United States Patent Application Publication US 2024/0390523 A1 - sequence listing, part 3

SEQ ID NO: 2716 - RNA, 103 nt, synthetic construct; identical to SEQ ID NO: 1700
  source 1..103: mol_type = other RNA
  modified_base 1: mod_base = OTHER; note = 2'-O-methyl ribonucleotide
  modified_base 2: mod_base = OTHER; note = 2'-O-methyl ribonucleotide
  modified_base 3: mod_base = OTHER; note = 2'-O-methyl ribonucleotide
  modified_base 21: mod_base = OTHER; note = 2'-O-methyl ribonucleotide
  modified_base 28: mod_base = OTHER; note = 2'-O-methyl ribonucleotide
  modified_base 29: mod_base = OTHER; note = 2'-O-methyl ribonucleotide
  modified_base 30: mod_base = OTHER; note = 2'-O-methyl ribonucleotide
  modified_base 31: mod_base = OTHER; note = 2'-O-methyl ribonucleotide
  modified_base 32: mod_base = OTHER; note = 2'-O-methyl ribonucleotide
  modified_base 34: mod_base = OTHER; note = 2'-O-methyl ribonucleotide
  modified_base 35: mod_base = OTHER; note = 2'-O-methyl ribonucleotide
  modified_base 36: mod_base = OTHER; note = 2'-O-methyl ribonucleotide
  modified_base 37: mod_base = OTHER; note = 2'-O-methyl ribonucleotide
  modified_base 38: mod_base = OTHER; note = 2'-O-methyl ribonucleotide
  modified_base 39: mod_base = OTHER; note = 2'-O-methyl ribonucleotide
  modified_base 40: mod_base = OTHER; note = 2'-O-methyl ribonucleotide
  modified_base 41: mod_base = OTHER; note = 2'-O-methyl ribonucleotide
  modified_base 42: mod_base = OTHER; note = 2'-O-methyl ribonucleotide
  modified_base 46: mod_base = OTHER; note = 2'-O-methyl ribonucleotide
  modified_base 48: mod_base = OTHER; note = 2'-O-methyl ribonucleotide
  modified_base 50: mod_base = OTHER; note = 2'-O-methyl ribonucleotide
  modified_base 52: mod_base = OTHER; note = 2'-O-methyl ribonucleotide
  modified_base 53: mod_base = OTHER; note = 2'-O-methyl ribonucleotide
  modified_base 54: mod_base = OTHER; note = 2'-O-methyl ribonucleotide
  modified_base 57: mod_base = OTHER; note = 2'-O-methyl ribonucleotide
  modified_base 61: mod_base = OTHER; note = 2'-O-methyl ribonucleotide
  modified_base 66: mod_base = OTHER; note = 2'-O-methyl ribonucleotide
  modified_base 67: mod_base = OTHER; note = 2'-O-methyl ribonucleotide
  modified_base 70: mod_base = OTHER; note = 2'-O-methyl ribonucleotide
  modified_base 71: mod_base = OTHER; note = 2'-O-methyl ribonucleotide
  modified_base 72: mod_base = OTHER; note = 2'-O-methyl ribonucleotide
  modified_base 73: mod_base = OTHER; note = 2'-O-methyl ribonucleotide
  modified_base 74: mod_base = OTHER; note = 2'-O-methyl ribonucleotide
  modified_base 75: mod_base = OTHER; note = 2'-O-methyl ribonucleotide
  modified_base 76: mod_base = OTHER; note = 2'-O-methyl ribonucleotide
  modified_base 77: mod_base = OTHER; note = 2'-O-methyl ribonucleotide
  modified_base 78: mod_base = OTHER; note = 2'-O-methyl ribonucleotide
  modified_base 79: mod_base = OTHER; note = 2'-O-methyl ribonucleotide
  modified_base 80: mod_base = OTHER; note = 2'-O-methyl ribonucleotide
  modified_base 82: mod_base = OTHER; note = 2'-O-methyl ribonucleotide
  modified_base 83: mod_base = OTHER; note = 2'-O-methyl ribonucleotide
  modified_base 84: mod_base = OTHER; note = 2'-O-methyl ribonucleotide
  modified_base 85: mod_base = OTHER; note = 2'-O-methyl ribonucleotide
  modified_base 86: mod_base = OTHER; note = 2'-O-methyl ribonucleotide
  modified_base 87: mod_base = OTHER; note = 2'-O-methyl ribonucleotide
  modified_base 89: mod_base = OTHER; note = 2'-O-methyl ribonucleotide
  modified_base 92: mod_base = OTHER; note = 2'-O-methyl ribonucleotide
  modified_base 93: mod_base = OTHER; note = 2'-O-methyl ribonucleotide
  modified_base 94: mod_base = OTHER; note = 2'-O-methyl ribonucleotide
  modified_base 95: mod_base = OTHER; note = 2'-O-methyl ribonucleotide
  modified_base 96: mod_base = OTHER; note = 2'-O-methyl ribonucleotide
  modified_base 97: mod_base = OTHER; note = 2'-O-methyl ribonucleotide
  modified_base 98: mod_base = OTHER; note = 2'-O-methyl ribonucleotide
  modified_base 99: mod_base = OTHER; note = 2'-O-methyl ribonucleotide
  modified_base 100: mod_base = OTHER; note = 2'-O-methyl ribonucleotide
  modified_base 1..3: mod_base = OTHER; note = phosphorothioate linkage
  modified_base 98..100: mod_base = OTHER; note = phosphorothioate linkage

SEQ ID NO: 2717 - RNA, 103 nt, synthetic construct; identical to SEQ ID NO: 1700
  source 1..103: mol_type = other RNA
  modified_base 1: mod_base = OTHER; note = 2'-O-methyl ribonucleotide
  modified_base 2: mod_base = OTHER; note = 2'-O-methyl ribonucleotide
  modified_base 3: mod_base = OTHER; note = 2'-O-methyl ribonucleotide
  modified_base 21: mod_base = OTHER; note = 2'-O-methyl ribonucleotide
  modified_base 28: mod_base = OTHER; note = 2'-O-methyl ribonucleotide
  modified_base 29: mod_base = OTHER; note = 2'-O-methyl ribonucleotide
  modified_base 30: mod_base = OTHER; note = 2'-O-methyl ribonucleotide
  modified_base 31: mod_base = OTHER; note = 2'-O-methyl ribonucleotide
  modified_base 32: mod_base = OTHER; note = 2'-O-methyl ribonucleotide
  modified_base 34: mod_base = OTHER; note = 2'-O-methyl ribonucleotide
  modified_base 35: mod_base = OTHER; note = 2'-O-methyl ribonucleotide
  modified_base 36: mod_base = OTHER; note = 2'-O-methyl ribonucleotide
  modified_base 37: mod_base = OTHER; note = 2'-O-methyl ribonucleotide
  modified_base 38: mod_base = OTHER; note = 2'-O-methyl ribonucleotide
  modified_base 39: mod_base = OTHER; note = 2'-O-methyl ribonucleotide
  modified_base 40: mod_base = OTHER; note = 2'-O-methyl ribonucleotide
  modified_base 41: mod_base = OTHER; note = 2'-O-methyl ribonucleotide
  modified_base 42: mod_base = OTHER; note = 2'-O-methyl ribonucleotide
  modified_base 46: mod_base = OTHER; note = 2'-O-methyl ribonucleotide
  modified_base 48: mod_base = OTHER; note = 2'-O-methyl ribonucleotide
  modified_base 50: mod_base = OTHER; note = 2'-O-methyl ribonucleotide
  modified_base 52: mod_base = OTHER; note = 2'-O-methyl ribonucleotide
  modified_base 53: mod_base = OTHER; note = 2'-O-methyl ribonucleotide
  modified_base 54: mod_base = OTHER; note = 2'-O-methyl ribonucleotide
  modified_base 57: mod_base = OTHER; note = 2'-O-methyl ribonucleotide
  modified_base 61: mod_base = OTHER; note = 2'-O-methyl ribonucleotide
  modified_base 66: mod_base = OTHER; note = 2'-O-methyl ribonucleotide
  modified_base 67: mod_base = OTHER; note = 2'-O-methyl ribonucleotide
  modified_base 70: mod_base = OTHER; note = 2'-O-methyl ribonucleotide
  modified_base 71: mod_base = OTHER; note = 2'-O-methyl ribonucleotide
  modified_base 72: mod_base = OTHER; note = 2'-O-methyl ribonucleotide
  modified_base 73: mod_base = OTHER; note = 2'-O-methyl ribonucleotide
  modified_base 74: mod_base = OTHER; note = 2'-O-methyl ribonucleotide
  modified_base 75: mod_base = OTHER; note = 2'-O-methyl ribonucleotide
  modified_base 76: mod_base = OTHER; note = 2'-O-methyl ribonucleotide
  modified_base 77: mod_base = OTHER; note = 2'-O-methyl ribonucleotide
  modified_base 78: mod_base = OTHER; note = 2'-O-methyl ribonucleotide
  modified_base 79: mod_base = OTHER; note = 2'-O-methyl ribonucleotide
  modified_base 80: mod_base = OTHER; note = 2'-O-methyl ribonucleotide
  modified_base 82: mod_base = OTHER; note = 2'-O-methyl ribonucleotide
  modified_base 83: mod_base = OTHER; note = 2'-O-methyl ribonucleotide
  modified_base 84: mod_base = OTHER; note = 2'-O-methyl ribonucleotide
  modified_base 85: mod_base = OTHER; note = 2'-O-methyl ribonucleotide
  modified_base 86: mod_base = OTHER; note = 2'-O-methyl ribonucleotide
  modified_base 87: mod_base = OTHER; note = 2'-O-methyl ribonucleotide
  modified_base 89: mod_base = OTHER; note = 2'-O-methyl ribonucleotide
  modified_base 91: mod_base = OTHER; note = 2'-O-methyl ribonucleotide
  modified_base 92: mod_base = OTHER; note = 2'-O-methyl ribonucleotide
  modified_base 93: mod_base = OTHER; note = 2'-O-methyl ribonucleotide
  modified_base 94: mod_base = OTHER; note = 2'-O-methyl ribonucleotide
  modified_base 95: mod_base = OTHER; note = 2'-O-methyl ribonucleotide
  modified_base 96: mod_base = OTHER; note = 2'-O-methyl ribonucleotide
  modified_base 97: mod_base = OTHER; note = 2'-O-methyl ribonucleotide
  modified_base 98: mod_base = OTHER; note = 2'-O-methyl ribonucleotide
  modified_base 99: mod_base = OTHER; note = 2'-O-methyl ribonucleotide
  modified_base 100: mod_base = OTHER; note = 2'-O-methyl ribonucleotide
  modified_base 1..3: mod_base = OTHER; note = phosphorothioate linkage
  modified_base 98..100: mod_base = OTHER; note = phosphorothioate linkage

SEQ ID NO: 2718 - RNA, 103 nt, synthetic construct; identical to SEQ ID NO: 1700
  source 1..103: mol_type = other RNA
  modified_base 1: mod_base = OTHER; note = 2'-O-methyl ribonucleotide
  modified_base 2: mod_base = OTHER; note = 2'-O-methyl ribonucleotide
  modified_base 3: mod_base = OTHER; note = 2'-O-methyl ribonucleotide
  modified_base 21: mod_base = OTHER; note = 2'-O-methyl ribonucleotide
  modified_base 28: mod_base = OTHER; note = 2'-O-methyl ribonucleotide
  modified_base 29: mod_base = OTHER; note = 2'-O-methyl ribonucleotide
  modified_base 30: mod_base = OTHER; note = 2'-O-methyl ribonucleotide
  modified_base 31: mod_base = OTHER; note = 2'-O-methyl ribonucleotide
  modified_base 32: mod_base = OTHER; note = 2'-O-methyl ribonucleotide
  modified_base 34: mod_base = OTHER; note = 2'-O-methyl ribonucleotide
  modified_base 35: mod_base = OTHER; note = 2'-O-methyl ribonucleotide
  modified_base 36: mod_base = OTHER; note = 2'-O-methyl ribonucleotide
  modified_base 37: mod_base = OTHER; note = 2'-O-methyl ribonucleotide
  modified_base 38: mod_base = OTHER; note = 2'-O-methyl ribonucleotide
  modified_base 39: mod_base = OTHER; note = 2'-O-methyl ribonucleotide
  modified_base 40: mod_base = OTHER; note = 2'-O-methyl ribonucleotide
  modified_base 41: mod_base = OTHER; note = 2'-O-methyl ribonucleotide
  modified_base 42: mod_base = OTHER; note = 2'-O-methyl ribonucleotide
  modified_base 46: mod_base = OTHER; note = 2'-O-methyl ribonucleotide
  modified_base 48: mod_base = OTHER; note = 2'-O-methyl ribonucleotide
  modified_base 50: mod_base = OTHER; note = 2'-O-methyl ribonucleotide
  modified_base 52: mod_base = OTHER; note = 2'-O-methyl ribonucleotide
  modified_base 53: mod_base = OTHER; note = 2'-O-methyl ribonucleotide
  modified_base 54: mod_base = OTHER; note = 2'-O-methyl ribonucleotide
  modified_base 55: mod_base = OTHER; note = 2'-O-methyl ribonucleotide
  modified_base 56: mod_base = OTHER; note = 2'-O-methyl ribonucleotide
  modified_base 57: mod_base = OTHER; note = 2'-O-methyl ribonucleotide
  modified_base 60: mod_base = OTHER; note = 2'-O-methyl ribonucleotide
  modified_base 61: mod_base = OTHER; note = 2'-O-methyl ribonucleotide
  modified_base 66: mod_base = OTHER; note = 2'-O-methyl ribonucleotide
  modified_base 67: mod_base = OTHER; note = 2'-O-methyl ribonucleotide
  modified_base 70: mod_base = OTHER; note = 2'-O-methyl ribonucleotide
  modified_base 71: mod_base = OTHER; note = 2'-O-methyl ribonucleotide
  modified_base 72: mod_base = OTHER; note = 2'-O-methyl ribonucleotide
  modified_base 74: mod_base = OTHER; note = 2'-O-methyl ribonucleotide
  modified_base 75: mod_base = OTHER; note = 2'-O-methyl ribonucleotide
  modified_base 76: mod_base = OTHER; note = 2'-O-methyl ribonucleotide
  modified_base 77: mod_base = OTHER; note = 2'-O-methyl ribonucleotide
  modified_base 78: mod_base = OTHER; note = 2'-O-methyl ribonucleotide
  modified_base 79: mod_base = OTHER; note = 2'-O-methyl ribonucleotide
  modified_base 80: mod_base = OTHER; note = 2'-O-methyl ribonucleotide
  modified_base 82: mod_base = OTHER; note = 2'-O-methyl ribonucleotide
  modified_base 83: mod_base = OTHER; note = 2'-O-methyl ribonucleotide
  modified_base 84: mod_base = OTHER; note = 2'-O-methyl ribonucleotide
  modified_base 85: mod_base = OTHER; note = 2'-O-methyl ribonucleotide
  modified_base 86: mod_base = OTHER; note = 2'-O-methyl ribonucleotide
  modified_base 87: mod_base = OTHER; note = 2'-O-methyl ribonucleotide
  modified_base 89: mod_base = OTHER; note = 2'-O-methyl ribonucleotide
  modified_base 92: mod_base = OTHER; note = 2'-O-methyl ribonucleotide
  modified_base 93: mod_base = OTHER; note = 2'-O-methyl ribonucleotide
  modified_base 94: mod_base = OTHER; note = 2'-O-methyl ribonucleotide
  modified_base 95: mod_base = OTHER; note = 2'-O-methyl ribonucleotide
  modified_base 96: mod_base = OTHER; note = 2'-O-methyl ribonucleotide
  modified_base 97: mod_base = OTHER; note = 2'-O-methyl ribonucleotide
  modified_base 98: mod_base = OTHER; note = 2'-O-methyl ribonucleotide
  modified_base 99: mod_base = OTHER; note = 2'-O-methyl ribonucleotide
  modified_base 100: mod_base = OTHER; note = 2'-O-methyl ribonucleotide
  modified_base 1..3: mod_base = OTHER; note = phosphorothioate linkage
  modified_base 98..100: mod_base = OTHER; note = phosphorothioate linkage

SEQ ID NO: 2719 - RNA, 103 nt, synthetic construct; identical to SEQ ID NO: 1643
  source 1..103: mol_type = other RNA
  modified_base 1: mod_base = OTHER; note = 2'-O-methyl ribonucleotide
  modified_base 2: mod_base = OTHER; note = 2'-O-methyl ribonucleotide
  modified_base 3: mod_base = OTHER; note = 2'-O-methyl ribonucleotide
  modified_base 21: mod_base = OTHER; note = 2'-O-methyl ribonucleotide
  modified_base 28: mod_base = OTHER; note = 2'-O-methyl ribonucleotide
  modified_base 29: mod_base = OTHER; note = 2'-O-methyl ribonucleotide
  modified_base 30: mod_base = OTHER; note = 2'-O-methyl ribonucleotide
  modified_base 31: mod_base = OTHER; note = 2'-O-methyl ribonucleotide
  modified_base 32: mod_base = OTHER; note = 2'-O-methyl ribonucleotide
  modified_base 33: mod_base = OTHER; note = 2'-O-methyl ribonucleotide
  modified_base 34: mod_base = OTHER; note = 2'-O-methyl ribonucleotide
  modified_base 35: mod_base = OTHER; note = 2'-O-methyl ribonucleotide
  modified_base 36: mod_base = OTHER; note = 2'-O-methyl ribonucleotide
  modified_base 37: mod_base = OTHER; note = 2'-O-methyl ribonucleotide
  modified_base 38: mod_base = OTHER; note = 2'-O-methyl ribonucleotide
  modified_base 39: mod_base = OTHER; note = 2'-O-methyl ribonucleotide
  modified_base 40: mod_base = OTHER; note = 2'-O-methyl ribonucleotide
  modified_base 41: mod_base = OTHER; note = 2'-O-methyl ribonucleotide
  modified_base 42: mod_base = OTHER; note = 2'-O-methyl ribonucleotide
  modified_base 46: mod_base = OTHER; note = 2'-O-methyl ribonucleotide
  modified_base 48: mod_base = OTHER; note = 2'-O-methyl ribonucleotide
  modified_base 50: mod_base = OTHER; note = 2'-O-methyl ribonucleotide
  modified_base 52: mod_base = OTHER; note = 2'-O-methyl ribonucleotide
  modified_base 53: mod_base = OTHER; note = 2'-O-methyl ribonucleotide
  modified_base 54: mod_base = OTHER; note = 2'-O-methyl ribonucleotide
  modified_base 55: mod_base = OTHER; note = 2'-O-methyl ribonucleotide
  modified_base 56: mod_base = OTHER; note = 2'-O-methyl ribonucleotide
  modified_base 57: mod_base = OTHER; note = 2'-O-methyl ribonucleotide
  modified_base 60: mod_base = OTHER; note = 2'-O-methyl ribonucleotide
  modified_base 61: mod_base = OTHER; note = 2'-O-methyl ribonucleotide
  modified_base 66: mod_base = OTHER; note = 2'-O-methyl ribonucleotide
  modified_base 67: mod_base = OTHER; note = 2'-O-methyl ribonucleotide
  modified_base 70: mod_base = OTHER; note = 2'-O-methyl ribonucleotide
  modified_base 71: mod_base = OTHER; note = 2'-O-methyl ribonucleotide
  modified_base 72: mod_base = OTHER; note = 2'-O-methyl ribonucleotide
  modified_base 73: mod_base = OTHER; note = 2'-O-methyl ribonucleotide
  modified_base 74: mod_base = OTHER; note = 2'-O-methyl ribonucleotide
  modified_base 75: mod_base = OTHER; note = 2'-O-methyl ribonucleotide
  modified_base 76: mod_base = OTHER; note = 2'-O-methyl ribonucleotide
  modified_base 77: mod_base = OTHER; note = 2'-O-methyl ribonucleotide
  modified_base 78: mod_base = OTHER; note = 2'-O-methyl ribonucleotide
  modified_base 79: mod_base = OTHER; note = 2'-O-methyl ribonucleotide
  modified_base 80: mod_base = OTHER; note = 2'-O-methyl ribonucleotide
  modified_base 81: mod_base = OTHER; note = 2'-O-methyl ribonucleotide
  modified_base 83: mod_base = OTHER; note = 2'-O-methyl ribonucleotide
  modified_base 84: mod_base = OTHER; note = 2'-O-methyl ribonucleotide
  modified_base 85: mod_base = OTHER; note = 2'-O-methyl ribonucleotide
  modified_base 86: mod_base = OTHER; note = 2'-O-methyl ribonucleotide
  modified_base 87: mod_base = OTHER; note = 2'-O-methyl ribonucleotide
  modified_base 88: mod_base = OTHER; note = 2'-O-methyl ribonucleotide
  modified_base 89: mod_base = OTHER; note = 2'-O-methyl ribonucleotide
  modified_base 90: mod_base = OTHER; note = 2'-O-methyl ribonucleotide
  modified_base 91: mod_base = OTHER; note = 2'-O-methyl ribonucleotide
  modified_base 92: mod_base = OTHER; note = 2'-O-methyl ribonucleotide
  modified_base 93: mod_base = OTHER; note = 2'-O-methyl ribonucleotide
  modified_base 94: mod_base = OTHER; note = 2'-O-methyl ribonucleotide
  modified_base 95: mod_base = OTHER; note = 2'-O-methyl ribonucleotide
  modified_base 96: mod_base = OTHER; note = 2'-O-methyl ribonucleotide
  modified_base 97: mod_base = OTHER; note = 2'-O-methyl ribonucleotide
  modified_base 98: mod_base = OTHER; note = 2'-O-methyl ribonucleotide
  modified_base 99: mod_base = OTHER; note = 2'-O-methyl ribonucleotide
  modified_base 100: mod_base = OTHER; note = 2'-O-methyl ribonucleotide
  modified_base 1..3: mod_base = OTHER; note = phosphorothioate linkage
  modified_base 98..100: mod_base = OTHER; note = phosphorothioate linkage

SEQ ID NO: 2720 - RNA, 103 nt, synthetic construct; identical to SEQ ID NO: 1643
  source 1..103: mol_type = other RNA
  modified_base 1: mod_base = OTHER; note = 2'-O-methyl ribonucleotide
  modified_base 2: mod_base = OTHER; note = 2'-O-methyl ribonucleotide
  modified_base 3: mod_base = OTHER; note = 2'-O-methyl ribonucleotide
  modified_base 21: mod_base = OTHER; note = 2'-O-methyl ribonucleotide
  modified_base 28: mod_base = OTHER; note = 2'-O-methyl ribonucleotide
  modified_base 29: mod_base = OTHER; note = 2'-O-methyl ribonucleotide
  modified_base 30: mod_base = OTHER; note = 2'-O-methyl ribonucleotide
  modified_base 31: mod_base = OTHER; note = 2'-O-methyl ribonucleotide
  modified_base 32: mod_base = OTHER; note = 2'-O-methyl ribonucleotide
  modified_base 34: mod_base = OTHER; note = 2'-O-methyl ribonucleotide
  modified_base 35: mod_base = OTHER; note = 2'-O-methyl ribonucleotide
  modified_base 36: mod_base = OTHER; note = 2'-O-methyl ribonucleotide
  modified_base 37: mod_base = OTHER; note = 2'-O-methyl ribonucleotide
  modified_base 38: mod_base = OTHER; note = 2'-O-methyl ribonucleotide
  modified_base 39: mod_base = OTHER; note = 2'-O-methyl ribonucleotide
  modified_base 40: mod_base = OTHER; note = 2'-O-methyl ribonucleotide
  modified_base 41: mod_base = OTHER; note = 2'-O-methyl ribonucleotide
  modified_base 42: mod_base = OTHER; note = 2'-O-methyl ribonucleotide
  modified_base 46: mod_base = OTHER; note = 2'-O-methyl ribonucleotide
  modified_base 48: mod_base = OTHER; note = 2'-O-methyl ribonucleotide
  modified_base 50: mod_base = OTHER; note = 2'-O-methyl ribonucleotide
  modified_base 52: mod_base = OTHER; note = 2'-O-methyl ribonucleotide
  modified_base 53: mod_base = OTHER; note = 2'-O-methyl ribonucleotide
  modified_base 54: mod_base = OTHER; note = 2'-O-methyl ribonucleotide
  modified_base 55: mod_base = OTHER; note = 2'-O-methyl ribonucleotide
  modified_base 56: mod_base = OTHER; note = 2'-O-methyl ribonucleotide
  modified_base 57: mod_base = OTHER; note = 2'-O-methyl ribonucleotide
  modified_base 60: mod_base = OTHER; note = 2'-O-methyl ribonucleotide
  modified_base 61: mod_base = OTHER; note = 2'-O-methyl ribonucleotide
  modified_base 66: mod_base = OTHER; note = 2'-O-methyl ribonucleotide
  modified_base 67: mod_base = OTHER; note = 2'-O-methyl ribonucleotide
  modified_base 70: mod_base = OTHER; note = 2'-O-methyl ribonucleotide
  modified_base 71: mod_base = OTHER; note = 2'-O-methyl ribonucleotide
  modified_base 72: mod_base = OTHER; note = 2'-O-methyl ribonucleotide
  modified_base 74: mod_base = OTHER; note = 2'-O-methyl ribonucleotide
  modified_base 75: mod_base = OTHER; note = 2'-O-methyl ribonucleotide
  modified_base 76: mod_base = OTHER; note = 2'-O-methyl ribonucleotide
  modified_base 77: mod_base = OTHER; note = 2'-O-methyl ribonucleotide
  modified_base 78: mod_base = OTHER; note = 2'-O-methyl ribonucleotide
  modified_base 79: mod_base = OTHER; note = 2'-O-methyl ribonucleotide
  modified_base 80: mod_base = OTHER; note = 2'-O-methyl ribonucleotide
  modified_base 81: mod_base = OTHER; note = 2'-O-methyl ribonucleotide
  modified_base 83: mod_base = OTHER; note = 2'-O-methyl ribonucleotide
  modified_base 84: mod_base = OTHER; note = 2'-O-methyl ribonucleotide
  modified_base 85: mod_base = OTHER; note = 2'-O-methyl ribonucleotide
  modified_base 86: mod_base = OTHER; note = 2'-O-methyl ribonucleotide
  modified_base 87: mod_base = OTHER; note = 2'-O-methyl ribonucleotide
  modified_base 88: mod_base = OTHER; note = 2'-O-methyl ribonucleotide
  modified_base 89: mod_base = OTHER; note = 2'-O-methyl ribonucleotide
  modified_base 90: mod_base = OTHER; note = 2'-O-methyl ribonucleotide
  modified_base 91: mod_base = OTHER; note = 2'-O-methyl ribonucleotide
  modified_base 92: mod_base = OTHER; note = 2'-O-methyl ribonucleotide
  modified_base 93: mod_base = OTHER; note = 2'-O-methyl ribonucleotide
  modified_base 94: mod_base = OTHER; note = 2'-O-methyl ribonucleotide
  modified_base 95: mod_base = OTHER; note = 2'-O-methyl ribonucleotide
  modified_base 96: mod_base = OTHER; note = 2'-O-methyl ribonucleotide
  modified_base 97: mod_base = OTHER; note = 2'-O-methyl ribonucleotide
  modified_base 98: mod_base = OTHER; note = 2'-O-methyl ribonucleotide
  modified_base 99: mod_base = OTHER; note = 2'-O-methyl ribonucleotide
  modified_base 100: mod_base = OTHER; note = 2'-O-methyl ribonucleotide
  modified_base 1..3: mod_base = OTHER; note = phosphorothioate linkage
  modified_base 98..100: mod_base = OTHER; note = phosphorothioate linkage

SEQ ID NO: 2721 - RNA, 103 nt, synthetic construct; identical to SEQ ID NO: 1699
  source 1..103: mol_type = other RNA
  modified_base 1: mod_base = OTHER; note = 2'-O-methyl ribonucleotide
  modified_base 2: mod_base = OTHER; note = 2'-O-methyl ribonucleotide
  modified_base 3: mod_base = OTHER; note = 2'-O-methyl ribonucleotide
  modified_base 21: mod_base = OTHER; note = 2'-O-methyl ribonucleotide
  modified_base 28: mod_base = OTHER; note = 2'-O-methyl ribonucleotide
  modified_base 29: mod_base = OTHER; note = 2'-O-methyl ribonucleotide
  modified_base 30: mod_base = OTHER; note = 2'-O-methyl ribonucleotide
  modified_base 31: mod_base = OTHER; note = 2'-O-methyl ribonucleotide
  modified_base 32: mod_base = OTHER; note = 2'-O-methyl ribonucleotide
  modified_base 33: mod_base = OTHER; note = 2'-O-methyl ribonucleotide
  modified_base 34: mod_base = OTHER; note = 2'-O-methyl ribonucleotide
  modified_base 35: mod_base = OTHER; note = 2'-O-methyl ribonucleotide
  modified_base 36: mod_base = OTHER; note = 2'-O-methyl ribonucleotide
  modified_base 37: mod_base = OTHER; note = 2'-O-methyl ribonucleotide
  modified_base 38: mod_base = OTHER; note = 2'-O-methyl ribonucleotide
  modified_base 39: mod_base = OTHER; note = 2'-O-methyl ribonucleotide
  modified_base 40: mod_base = OTHER; note = 2'-O-methyl ribonucleotide
  modified_base 41: mod_base = OTHER; note = 2'-O-methyl ribonucleotide
  modified_base 42: mod_base = OTHER; note = 2'-O-methyl ribonucleotide
  modified_base 46: mod_base = OTHER; note = 2'-O-methyl ribonucleotide
  modified_base 48: mod_base = OTHER; note = 2'-O-methyl ribonucleotide
  modified_base 50: mod_base = OTHER; note = 2'-O-methyl ribonucleotide
  modified_base 52: mod_base = OTHER; note = 2'-O-methyl ribonucleotide
  modified_base 53: mod_base = OTHER; note = 2'-O-methyl ribonucleotide
  modified_base 54: mod_base = OTHER; note = 2'-O-methyl ribonucleotide
  modified_base 55: mod_base = OTHER; note = 2'-O-methyl ribonucleotide
  modified_base 56: mod_base = OTHER; note = 2'-O-methyl ribonucleotide
  modified_base 57: mod_base = OTHER; note = 2'-O-methyl ribonucleotide
  modified_base 60: mod_base = OTHER; note = 2'-O-methyl ribonucleotide
  modified_base 61: mod_base = OTHER; note = 2'-O-methyl ribonucleotide
  modified_base 66: mod_base = OTHER; note = 2'-O-methyl ribonucleotide
  modified_base 67: mod_base = OTHER; note = 2'-O-methyl ribonucleotide
  modified_base 70: mod_base = OTHER; note = 2'-O-methyl ribonucleotide
  modified_base 71: mod_base = OTHER; note = 2'-O-methyl ribonucleotide
  modified_base 72: mod_base = OTHER; note = 2'-O-methyl ribonucleotide
  modified_base 73: mod_base = OTHER; note = 2'-O-methyl ribonucleotide
  modified_base 74: mod_base = OTHER; note = 2'-O-methyl ribonucleotide
  modified_base 75: mod_base = OTHER; note = 2'-O-methyl ribonucleotide
  modified_base 76: mod_base = OTHER; note = 2'-O-methyl ribonucleotide
  modified_base 77: mod_base = OTHER; note = 2'-O-methyl ribonucleotide
  modified_base 78: mod_base = OTHER; note = 2'-O-methyl ribonucleotide
  modified_base 79: mod_base = OTHER; note = 2'-O-methyl ribonucleotide
  modified_base 80: mod_base = OTHER; note = 2'-O-methyl ribonucleotide
  modified_base 81: mod_base = OTHER; note = 2'-O-methyl ribonucleotide
  modified_base 83: mod_base = OTHER; note = 2'-O-methyl ribonucleotide
  modified_base 84: mod_base = OTHER; note = 2'-O-methyl ribonucleotide
  modified_base 85: mod_base = OTHER; note = 2'-O-methyl ribonucleotide
  modified_base 86: mod_base = OTHER; note = 2'-O-methyl ribonucleotide
  modified_base 87: mod_base = OTHER; note = 2'-O-methyl ribonucleotide
  modified_base 88: mod_base = OTHER; note = 2'-O-methyl ribonucleotide
  modified_base 89: mod_base = OTHER; note = 2'-O-methyl ribonucleotide
  modified_base 90: mod_base = OTHER; note = 2'-O-methyl ribonucleotide
  modified_base 91: mod_base = OTHER; note = 2'-O-methyl ribonucleotide
  modified_base 92: mod_base = OTHER; note = 2'-O-methyl ribonucleotide
  modified_base 93: mod_base = OTHER; note = 2'-O-methyl ribonucleotide
  modified_base 94: mod_base = OTHER; note = 2'-O-methyl ribonucleotide
  modified_base 95: mod_base = OTHER; note = 2'-O-methyl ribonucleotide
  modified_base 96: mod_base = OTHER; note = 2'-O-methyl ribonucleotide
  modified_base 97: mod_base = OTHER; note = 2'-O-methyl ribonucleotide
  modified_base 98: mod_base = OTHER; note = 2'-O-methyl ribonucleotide
  modified_base 99: mod_base = OTHER; note = 2'-O-methyl ribonucleotide
  modified_base 100: mod_base = OTHER; note = 2'-O-methyl ribonucleotide
  modified_base 1..3: mod_base = OTHER; note = phosphorothioate linkage
  modified_base 98..100: mod_base = OTHER; note = phosphorothioate linkage

SEQ ID NO: 2722 - RNA, 103 nt, synthetic construct; identical to SEQ ID NO: 1699
  source 1..103: mol_type = other RNA
  modified_base 1: mod_base = OTHER; note = 2'-O-methyl ribonucleotide
  modified_base 2: mod_base = OTHER; note = 2'-O-methyl ribonucleotide
  modified_base 3: mod_base = OTHER; note = 2'-O-methyl ribonucleotide
  modified_base 21: mod_base = OTHER; note = 2'-O-methyl ribonucleotide
  modified_base 28: mod_base = OTHER; note = 2'-O-methyl ribonucleotide
  modified_base 29: mod_base = OTHER; note = 2'-O-methyl ribonucleotide
  modified_base 30: mod_base = OTHER; note = 2'-O-methyl ribonucleotide
  modified_base 31: mod_base = OTHER; note = 2'-O-methyl ribonucleotide
  modified_base 32: mod_base = OTHER; note = 2'-O-methyl ribonucleotide
  modified_base 34: mod_base = OTHER; note = 2'-O-methyl ribonucleotide
  modified_base 35: mod_base = OTHER; note = 2'-O-methyl ribonucleotide
  modified_base 36: mod_base = OTHER; note = 2'-O-methyl ribonucleotide
  modified_base 37: mod_base = OTHER; note = 2'-O-methyl ribonucleotide
  modified_base 38: mod_base = OTHER; note = 2'-O-methyl ribonucleotide
  modified_base 39: mod_base = OTHER; note = 2'-O-methyl ribonucleotide
  modified_base 40: mod_base = OTHER; note = 2'-O-methyl ribonucleotide
  modified_base 41: mod_base = OTHER; note = 2'-O-methyl ribonucleotide
  modified_base 42: mod_base = OTHER; note = 2'-O-methyl ribonucleotide
  modified_base 46: mod_base = OTHER; note = 2'-O-methyl ribonucleotide
  modified_base 48: mod_base = OTHER; note = 2'-O-methyl ribonucleotide
  modified_base 50: mod_base = OTHER; note = 2'-O-methyl ribonucleotide
  modified_base 52: mod_base = OTHER; note = 2'-O-methyl ribonucleotide
  modified_base 53: mod_base = OTHER; note = 2'-O-methyl ribonucleotide
  modified_base 54: mod_base = OTHER; note = 2'-O-methyl ribonucleotide
  modified_base 55: mod_base = OTHER; note = 2'-O-methyl ribonucleotide
  modified_base 56: mod_base = OTHER; note = 2'-O-methyl ribonucleotide
  modified_base 57: mod_base = OTHER; note = 2'-O-methyl ribonucleotide
  modified_base 60: mod_base = OTHER; note = 2'-O-methyl ribonucleotide
  modified_base 61: mod_base = OTHER; note = 2'-O-methyl ribonucleotide
  modified_base 66: mod_base = OTHER; note = 2'-O-methyl ribonucleotide
  modified_base 67: mod_base = OTHER; note = 2'-O-methyl ribonucleotide
  modified_base 70: mod_base = OTHER; note = 2'-O-methyl ribonucleotide
  modified_base 71: mod_base = OTHER; note = 2'-O-methyl ribonucleotide
  modified_base 72: mod_base = OTHER; note = 2'-O-methyl ribonucleotide
  modified_base 74: mod_base = OTHER; note = 2'-O-methyl ribonucleotide
  modified_base 75: mod_base = OTHER; note = 2'-O-methyl ribonucleotide
  modified_base 76: mod_base = OTHER; note = 2'-O-methyl ribonucleotide
  modified_base 77: mod_base = OTHER; note = 2'-O-methyl ribonucleotide
  modified_base 78: mod_base = OTHER; note = 2'-O-methyl ribonucleotide
  modified_base 79: mod_base = OTHER; note = 2'-O-methyl ribonucleotide
  modified_base 80: mod_base = OTHER; note = 2'-O-methyl ribonucleotide
  modified_base 81: mod_base = OTHER; note = 2'-O-methyl ribonucleotide
  modified_base 83: mod_base = OTHER; note = 2'-O-methyl ribonucleotide
  modified_base 84: mod_base = OTHER; note = 2'-O-methyl ribonucleotide
  modified_base 85: mod_base = OTHER; note = 2'-O-methyl ribonucleotide
  modified_base 86: mod_base = OTHER; note = 2'-O-methyl ribonucleotide
  modified_base 87: mod_base = OTHER; note = 2'-O-methyl ribonucleotide
  modified_base 88: mod_base = OTHER; note = 2'-O-methyl ribonucleotide
  modified_base 89: mod_base = OTHER; note = 2'-O-methyl ribonucleotide
  modified_base 90: mod_base = OTHER; note = 2'-O-methyl ribonucleotide
  modified_base 91: mod_base = OTHER; note = 2'-O-methyl ribonucleotide
  modified_base 92: mod_base = OTHER; note = 2'-O-methyl ribonucleotide
  modified_base 93: mod_base = OTHER; note = 2'-O-methyl ribonucleotide
  modified_base 94: mod_base = OTHER; note = 2'-O-methyl ribonucleotide
  modified_base 95: mod_base = OTHER; note = 2'-O-methyl ribonucleotide
  modified_base 96: mod_base = OTHER; note = 2'-O-methyl ribonucleotide
  modified_base 97: mod_base = OTHER; note = 2'-O-methyl ribonucleotide
  modified_base 98: mod_base = OTHER; note = 2'-O-methyl ribonucleotide
  modified_base 99: mod_base = OTHER; note = 2'-O-methyl ribonucleotide
  modified_base 100: mod_base = OTHER; note = 2'-O-methyl ribonucleotide
  modified_base 1..3: mod_base = OTHER; note = phosphorothioate linkage
  modified_base 98..100: mod_base = OTHER; note = phosphorothioate linkage

SEQ ID NO: 2723 - RNA, 103 nt, synthetic construct; identical to SEQ ID NO: 1643
  source 1..103: mol_type = other RNA
  modified_base 1: mod_base = OTHER; note = 2'-O-methyl ribonucleotide
  modified_base 2: mod_base = OTHER; note = 2'-O-methyl ribonucleotide
  modified_base 3: mod_base = OTHER; note = 2'-O-methyl ribonucleotide
  modified_base 21: mod_base = OTHER; note = 2'-O-methyl ribonucleotide
  modified_base 28: mod_base = OTHER; note = 2'-O-methyl ribonucleotide
  modified_base 29: mod_base = OTHER; note = 2'-O-methyl ribonucleotide
  modified_base 30: mod_base = OTHER; note = 2'-O-methyl ribonucleotide
  modified_base 31: mod_base = OTHER; note = 2'-O-methyl ribonucleotide
  modified_base 32: mod_base = OTHER; note = 2'-O-methyl ribonucleotide
  modified_base 33: mod_base = OTHER; note = 2'-O-methyl ribonucleotide
  modified_base 34: mod_base = OTHER; note = 2'-O-methyl ribonucleotide
  modified_base 35: mod_base = OTHER; note = 2'-O-methyl ribonucleotide
  modified_base 36: mod_base = OTHER; note = 2'-O-methyl ribonucleotide
  modified_base 37: mod_base = OTHER; note = 2'-O-methyl ribonucleotide
  modified_base 38: mod_base = OTHER; note = 2'-O-methyl ribonucleotide
  modified_base 39: mod_base = OTHER; note = 2'-O-methyl ribonucleotide
  modified_base 40: mod_base = OTHER; note = 2'-O-methyl ribonucleotide
  modified_base 41: mod_base = OTHER; note = 2'-O-methyl ribonucleotide
  modified_base 42: mod_base = OTHER; note = 2'-O-methyl ribonucleotide
  modified_base 46: mod_base = OTHER; note = 2'-O-methyl ribonucleotide
  modified_base 48: mod_base = OTHER; note = 2'-O-methyl ribonucleotide
  modified_base 50: mod_base = OTHER; note = 2'-O-methyl ribonucleotide
  modified_base 52: mod_base = OTHER; note = 2'-O-methyl ribonucleotide
  modified_base 53: mod_base = OTHER; note = 2'-O-methyl ribonucleotide
  modified_base 54: mod_base = OTHER; note = 2'-O-methyl ribonucleotide
  modified_base 55: mod_base = OTHER; note = 2'-O-methyl ribonucleotide
  modified_base 56: mod_base = OTHER; note = 2'-O-methyl ribonucleotide
  modified_base 57: mod_base = OTHER; note = 2'-O-methyl ribonucleotide
  modified_base 60: mod_base = OTHER; note = 2'-O-methyl ribonucleotide
  modified_base 61: mod_base = OTHER; note = 2'-O-methyl ribonucleotide
  modified_base 66: mod_base = OTHER; note = 2'-O-methyl ribonucleotide
  modified_base 67: mod_base = OTHER; note = 2'-O-methyl ribonucleotide
  modified_base 70: mod_base = OTHER; note = 2'-O-methyl ribonucleotide
  modified_base 71: mod_base = OTHER; note = 2'-O-methyl ribonucleotide
  modified_base 72: mod_base = OTHER; note = 2'-O-methyl ribonucleotide
  modified_base 73: mod_base = OTHER; note = 2'-O-methyl ribonucleotide
  modified_base 74: mod_base = OTHER; note = 2'-O-methyl ribonucleotide
  modified_base 75: mod_base = OTHER; note = 2'-O-methyl ribonucleotide
  modified_base 76: mod_base = OTHER; note = 2'-O-methyl ribonucleotide
  modified_base 77: mod_base = OTHER; note = 2'-O-methyl ribonucleotide
  modified_base 78: mod_base = OTHER; note = 2'-O-methyl ribonucleotide
  modified_base 79: mod_base = OTHER; note = 2'-O-methyl ribonucleotide
  modified_base 80: mod_base = OTHER; note = 2'-O-methyl ribonucleotide
  modified_base 81: mod_base = OTHER; note = 2'-O-methyl ribonucleotide
  modified_base 83: mod_base = OTHER; note = 2'-O-methyl ribonucleotide
  modified_base 84: mod_base = OTHER; note = 2'-O-methyl ribonucleotide
  modified_base 85: mod_base = OTHER; note = 2'-O-methyl ribonucleotide
  modified_base 86: mod_base = OTHER; note = 2'-O-methyl ribonucleotide
  modified_base 87: mod_base = OTHER; note = 2'-O-methyl ribonucleotide
  modified_base 88: mod_base = OTHER; note = 2'-O-methyl ribonucleotide
  modified_base 89: mod_base = OTHER; note = 2'-O-methyl ribonucleotide
  modified_base 90: mod_base = OTHER; note = 2'-O-methyl ribonucleotide
  modified_base 91: mod_base = OTHER; note = 2'-O-methyl ribonucleotide
  modified_base 92: mod_base = OTHER; note = 2'-O-methyl ribonucleotide
  modified_base 93: mod_base = OTHER; note = 2'-O-methyl ribonucleotide
  modified_base 94: mod_base = OTHER; note = 2'-O-methyl ribonucleotide
  modified_base 95: mod_base = OTHER; note = 2'-O-methyl ribonucleotide
  modified_base 96: mod_base = OTHER; note = 2'-O-methyl ribonucleotide
  modified_base 97: mod_base = OTHER; note = 2'-O-methyl ribonucleotide
  modified_base 98: mod_base = OTHER; note = 2'-O-methyl ribonucleotide
  modified_base 99: mod_base = OTHER; note = 2'-O-methyl ribonucleotide
  modified_base 100: mod_base = OTHER; note = 2'-O-methyl ribonucleotide
  modified_base 1..3: mod_base = OTHER; note = phosphorothioate linkage
  modified_base 64..65: mod_base = OTHER; note = phosphorothioate linkage
  modified_base 98..100: mod_base = OTHER; note = phosphorothioate linkage

SEQ ID NO: 2724 - RNA, 103 nt, synthetic construct; identical to SEQ ID NO: 1643
  source 1..103: mol_type = other RNA
  modified_base 1: mod_base = OTHER; note = 2'-O-methyl ribonucleotide
  modified_base 2: mod_base = OTHER; note = 2'-O-methyl ribonucleotide
  modified_base 3: mod_base = OTHER; note = 2'-O-methyl ribonucleotide
  modified_base 21: mod_base = OTHER; note = 2'-O-methyl ribonucleotide
  modified_base 28: mod_base = OTHER; note = 2'-O-methyl ribonucleotide
  modified_base 29: mod_base = OTHER; note = 2'-O-methyl ribonucleotide
  modified_base 30: mod_base = OTHER; note = 2'-O-methyl ribonucleotide
  modified_base 31: mod_base = OTHER; note = 2'-O-methyl ribonucleotide
  modified_base 32: mod_base = OTHER; note = 2'-O-methyl ribonucleotide
  modified_base 34: mod_base = OTHER; note = 2'-O-methyl ribonucleotide
  modified_base 35: mod_base = OTHER; note = 2'-O-methyl ribonucleotide
  modified_base 36: mod_base = OTHER; note = 2'-O-methyl ribonucleotide
  modified_base 37: mod_base = OTHER; note = 2'-O-methyl ribonucleotide
  modified_base 38: mod_base = OTHER; note = 2'-O-methyl ribonucleotide
  modified_base 39: mod_base = OTHER; note = 2'-O-methyl ribonucleotide
  modified_base 40: mod_base = OTHER; note = 2'-O-methyl ribonucleotide
  modified_base 41: mod_base = OTHER; note = 2'-O-methyl ribonucleotide
  modified_base 42: mod_base = OTHER; note = 2'-O-methyl ribonucleotide
  modified_base 46: mod_base = OTHER; note = 2'-O-methyl ribonucleotide
  modified_base 48: mod_base = OTHER; note = 2'-O-methyl ribonucleotide
  modified_base 50: mod_base = OTHER; note = 2'-O-methyl ribonucleotide
  modified_base 52: mod_base = OTHER; note = 2'-O-methyl ribonucleotide
  modified_base 53: mod_base = OTHER; note = 2'-O-methyl ribonucleotide
  modified_base 54: mod_base = OTHER; note = 2'-O-methyl ribonucleotide
  modified_base 55: mod_base = OTHER; note = 2'-O-methyl ribonucleotide
  modified_base 56: mod_base = OTHER; note = 2'-O-methyl ribonucleotide
  modified_base 57: mod_base = OTHER; note = 2'-O-methyl ribonucleotide
  modified_base 60: mod_base = OTHER; note = 2'-O-methyl ribonucleotide
  modified_base 61: mod_base = OTHER; note = 2'-O-methyl ribonucleotide
  modified_base 66: mod_base = OTHER; note = 2'-O-methyl ribonucleotide
  modified_base 67: mod_base = OTHER; note = 2'-O-methyl ribonucleotide
  modified_base 70: mod_base = OTHER; note = 2'-O-methyl ribonucleotide
  modified_base 71: mod_base = OTHER; note = 2'-O-methyl ribonucleotide
  modified_base 72: mod_base = OTHER; note = 2'-O-methyl ribonucleotide
  modified_base 74: mod_base = OTHER; note = 2'-O-methyl ribonucleotide
  modified_base 75: mod_base = OTHER; note = 2'-O-methyl ribonucleotide
  modified_base 76: mod_base = OTHER; note = 2'-O-methyl ribonucleotide
  modified_base 77: mod_base = OTHER; note = 2'-O-methyl ribonucleotide
  modified_base 78: mod_base = OTHER; note = 2'-O-methyl ribonucleotide
  modified_base 79: mod_base = OTHER; note = 2'-O-methyl ribonucleotide
  modified_base 80: mod_base = OTHER; note = 2'-O-methyl ribonucleotide
  modified_base 81: mod_base = OTHER; note = 2'-O-methyl ribonucleotide
  modified_base 83: mod_base = OTHER; note = 2'-O-methyl ribonucleotide
  modified_base 84: mod_base = OTHER; note = 2'-O-methyl ribonucleotide
  modified_base 85: mod_base = OTHER; note = 2'-O-methyl ribonucleotide
  modified_base 86: mod_base = OTHER; note = 2'-O-methyl ribonucleotide
  modified_base 87: mod_base = OTHER; note = 2'-O-methyl ribonucleotide
  modified_base 88: mod_base = OTHER; note = 2'-O-methyl ribonucleotide
  modified_base 89: mod_base = OTHER; note = 2'-O-methyl ribonucleotide
  modified_base 90: mod_base = OTHER; note = 2'-O-methyl ribonucleotide
  modified_base 91: mod_base = OTHER; note = 2'-O-methyl ribonucleotide
  modified_base 92: mod_base = OTHER; note = 2'-O-methyl ribonucleotide
  modified_base 93: mod_base = OTHER; note = 2'-O-methyl ribonucleotide
  modified_base 94: mod_base = OTHER; note = 2'-O-methyl ribonucleotide
  modified_base 95: mod_base = OTHER; note = 2'-O-methyl ribonucleotide
  modified_base 96: mod_base = OTHER; note = 2'-O-methyl ribonucleotide
  modified_base 97: mod_base = OTHER; note = 2'-O-methyl ribonucleotide
  modified_base 98: mod_base = OTHER; note = 2'-O-methyl ribonucleotide
  modified_base 99: mod_base = OTHER; note = 2'-O-methyl ribonucleotide
  modified_base 100: mod_base = OTHER; note = 2'-O-methyl ribonucleotide
  modified_base 1..3: mod_base = OTHER; note = phosphorothioate linkage
  modified_base 64..65: mod_base = OTHER; note = phosphorothioate linkage
  modified_base 98..100: mod_base = OTHER; note = phosphorothioate linkage

SEQ ID NO: 2725 - RNA, 103 nt, synthetic construct; identical to SEQ ID NO: 1699
  source 1..103: mol_type = other RNA
  modified_base 1: mod_base = OTHER; note = 2'-O-methyl ribonucleotide
  modified_base 2: mod_base = OTHER; note = 2'-O-methyl ribonucleotide
  modified_base 3: mod_base = OTHER; note = 2'-O-methyl ribonucleotide
  modified_base 21: mod_base = OTHER; note = 2'-O-methyl ribonucleotide
  modified_base 28: mod_base = OTHER; note = 2'-O-methyl ribonucleotide
  modified_base 29: mod_base = OTHER; note = 2'-O-methyl ribonucleotide
  modified_base 30: mod_base = OTHER; note = 2'-O-methyl ribonucleotide
  modified_base 31: mod_base = OTHER; note = 2'-O-methyl ribonucleotide
  modified_base 32: mod_base = OTHER; note = 2'-O-methyl ribonucleotide
  modified_base 33: mod_base = OTHER; note = 2'-O-methyl ribonucleotide
  modified_base 34: mod_base = OTHER; note = 2'-O-methyl ribonucleotide
  modified_base 35: mod_base = OTHER; note = 2'-O-methyl ribonucleotide
  modified_base 36: mod_base = OTHER; note = 2'-O-methyl ribonucleotide
  modified_base 37: mod_base = OTHER; note = 2'-O-methyl ribonucleotide
  modified_base 38: mod_base = OTHER; note = 2'-O-methyl ribonucleotide
  modified_base 39: mod_base = OTHER; note = 2'-O-methyl ribonucleotide
  modified_base 40: mod_base = OTHER; note = 2'-O-methyl ribonucleotide
  modified_base 41: mod_base = OTHER; note = 2'-O-methyl ribonucleotide
  modified_base 42: mod_base = OTHER; note = 2'-O-methyl ribonucleotide
  modified_base 46: mod_base = OTHER; note = 2'-O-methyl ribonucleotide
  modified_base 48: mod_base = OTHER; note = 2'-O-methyl ribonucleotide
  modified_base 50: mod_base = OTHER; note = 2'-O-methyl ribonucleotide
  modified_base 52: mod_base = OTHER; note = 2'-O-methyl ribonucleotide
  modified_base 53: mod_base = OTHER; note = 2'-O-methyl ribonucleotide
  modified_base 54: mod_base = OTHER; note = 2'-O-methyl ribonucleotide
  modified_base 55: mod_base = OTHER; note = 2'-O-methyl ribonucleotide
  modified_base 56: mod_base = OTHER; note = 2'-O-methyl ribonucleotide
  modified_base 57: mod_base = OTHER; note = 2'-O-methyl ribonucleotide
  modified_base 60: mod_base = OTHER; note = 2'-O-methyl ribonucleotide
  modified_base 61: mod_base = OTHER; note = 2'-O-methyl ribonucleotide
  modified_base 66: mod_base = OTHER; note = 2'-O-methyl ribonucleotide
  modified_base 67: mod_base = OTHER; note = 2'-O-methyl ribonucleotide
  modified_base 70: mod_base = OTHER; note = 2'-O-methyl ribonucleotide
  modified_base 71: mod_base = OTHER; note = 2'-O-methyl ribonucleotide
  modified_base 72: mod_base = OTHER; note = 2'-O-methyl ribonucleotide
  modified_base 73: mod_base = OTHER; note = 2'-O-methyl ribonucleotide
  modified_base 74: mod_base = OTHER; note = 2'-O-methyl ribonucleotide
  modified_base 75: mod_base = OTHER; note = 2'-O-methyl ribonucleotide
  modified_base 76: mod_base = OTHER; note = 2'-O-methyl ribonucleotide
  modified_base 77: mod_base = OTHER; note = 2'-O-methyl ribonucleotide
  modified_base 78: mod_base = OTHER; note = 2'-O-methyl ribonucleotide
  modified_base 79: mod_base = OTHER; note = 2'-O-methyl ribonucleotide
  modified_base 80: mod_base = OTHER; note = 2'-O-methyl ribonucleotide
  modified_base 81: mod_base = OTHER; note = 2'-O-methyl ribonucleotide
  modified_base 83: mod_base = OTHER; note = 2'-O-methyl ribonucleotide
  modified_base 84: mod_base = OTHER; note = 2'-O-methyl ribonucleotide
  modified_base 85: mod_base = OTHER; note = 2'-O-methyl ribonucleotide
  modified_base 86: mod_base = OTHER; note = 2'-O-methyl ribonucleotide
  modified_base 87: mod_base = OTHER; note = 2'-O-methyl ribonucleotide
  modified_base 88: mod_base = OTHER; note = 2'-O-methyl ribonucleotide
  modified_base 89: mod_base = OTHER; note = 2'-O-methyl ribonucleotide
  modified_base 90: mod_base = OTHER; note = 2'-O-methyl ribonucleotide
  modified_base 91: mod_base = OTHER; note = 2'-O-methyl ribonucleotide
  modified_base 92: mod_base = OTHER; note = 2'-O-methyl ribonucleotide
  modified_base 93: mod_base = OTHER; note = 2'-O-methyl ribonucleotide
  modified_base 94: mod_base = OTHER; note = 2'-O-methyl ribonucleotide
  modified_base 95: mod_base = OTHER; note = 2'-O-methyl ribonucleotide
  modified_base 96: mod_base = OTHER; note = 2'-O-methyl ribonucleotide
  modified_base 97: mod_base = OTHER; note = 2'-O-methyl ribonucleotide
  modified_base 98: mod_base = OTHER; note = 2'-O-methyl ribonucleotide
  modified_base 99: mod_base = OTHER; note = 2'-O-methyl ribonucleotide
  modified_base 100: mod_base = OTHER; note = 2'-O-methyl ribonucleotide
  modified_base 1..3: mod_base = OTHER; note = phosphorothioate linkage
  modified_base 64..65: mod_base = OTHER; note = phosphorothioate linkage
  modified_base 98..100: mod_base = OTHER; note = phosphorothioate linkage

SEQ ID NO: 2726 - RNA, 103 nt, synthetic construct; identical to SEQ ID NO: 1699
  source 1..103: mol_type = other RNA
  modified_base 1: mod_base = OTHER; note = 2'-O-methyl ribonucleotide
  modified_base 2: mod_base = OTHER; note = 2'-O-methyl ribonucleotide
  modified_base 3: mod_base = OTHER; note = 2'-O-methyl ribonucleotide
  modified_base 21: mod_base = OTHER; note = 2'-O-methyl ribonucleotide
  modified_base 28: mod_base = OTHER; note = 2'-O-methyl ribonucleotide
  modified_base 29: mod_base = OTHER; note = 2'-O-methyl ribonucleotide
  modified_base 30: mod_base = OTHER; note = 2'-O-methyl ribonucleotide
  modified_base 31: mod_base = OTHER; note = 2'-O-methyl ribonucleotide
  modified_base 32: mod_base = OTHER; note = 2'-O-methyl ribonucleotide
  modified_base 34: mod_base = OTHER; note = 2'-O-methyl ribonucleotide
  modified_base 35: mod_base = OTHER; note = 2'-O-methyl ribonucleotide
  modified_base 36: mod_base = OTHER; note = 2'-O-methyl ribonucleotide
  modified_base 37: mod_base = OTHER; note = 2'-O-methyl ribonucleotide
  modified_base 38: mod_base = OTHER; note = 2'-O-methyl ribonucleotide
  modified_base 39: mod_base = OTHER; note = 2'-O-methyl ribonucleotide
  modified_base 40: mod_base = OTHER; note = 2'-O-methyl ribonucleotide
  modified_base 41: mod_base = OTHER; note = 2'-O-methyl ribonucleotide
  modified_base 42: mod_base = OTHER; note = 2'-O-methyl ribonucleotide
  modified_base 46: mod_base = OTHER; note = 2'-O-methyl ribonucleotide
  modified_base 48: mod_base = OTHER; note = 2'-O-methyl ribonucleotide
  modified_base 50: mod_base = OTHER; note = 2'-O-methyl ribonucleotide
  modified_base 52: mod_base = OTHER; note = 2'-O-methyl ribonucleotide
  modified_base 53: mod_base = OTHER; note = 2'-O-methyl ribonucleotide
  modified_base 54: mod_base = OTHER; note = 2'-O-methyl ribonucleotide
  modified_base 55: mod_base = OTHER; note = 2'-O-methyl ribonucleotide
  modified_base 56: mod_base = OTHER; note = 2'-O-methyl ribonucleotide
  modified_base 57: mod_base = OTHER; note = 2'-O-methyl ribonucleotide
  modified_base 60: mod_base = OTHER; note = 2'-O-methyl ribonucleotide
  modified_base 61: mod_base = OTHER; note = 2'-O-methyl ribonucleotide
  modified_base 66: mod_base = OTHER; note = 2'-O-methyl ribonucleotide
  modified_base 67: mod_base = OTHER; note = 2'-O-methyl ribonucleotide
  modified_base 70: mod_base = OTHER; note = 2'-O-methyl ribonucleotide
  modified_base 71: mod_base = OTHER; note = 2'-O-methyl ribonucleotide
  modified_base 72: mod_base = OTHER; note = 2'-O-methyl ribonucleotide
  modified_base 74: mod_base = OTHER; note = 2'-O-methyl ribonucleotide
  modified_base 75: mod_base = OTHER; note = 2'-O-methyl ribonucleotide
  modified_base 76: mod_base = OTHER; note = 2'-O-methyl ribonucleotide
  modified_base 77: mod_base = OTHER; note = 2'-O-methyl ribonucleotide
  modified_base 78: mod_base = OTHER; note = 2'-O-methyl ribonucleotide
  modified_base 79: mod_base = OTHER; note = 2'-O-methyl ribonucleotide
  modified_base 80: mod_base = OTHER; note = 2'-O-methyl ribonucleotide
  modified_base 81: mod_base = OTHER; note = 2'-O-methyl ribonucleotide
  modified_base 83: mod_base = OTHER; note = 2'-O-methyl ribonucleotide
  modified_base 84: mod_base = OTHER; note = 2'-O-methyl ribonucleotide
  modified_base 85: mod_base = OTHER; note = 2'-O-methyl ribonucleotide
  modified_base 86: mod_base = OTHER; note = 2'-O-methyl ribonucleotide
  modified_base 87: mod_base = OTHER; note = 2'-O-methyl ribonucleotide
  modified_base 88: mod_base = OTHER; note = 2'-O-methyl ribonucleotide
  modified_base 89: mod_base = OTHER; note = 2'-O-methyl ribonucleotide
  modified_base 90: mod_base = OTHER; note = 2'-O-methyl ribonucleotide
  modified_base 91: mod_base = OTHER; note = 2'-O-methyl ribonucleotide
  modified_base 92: mod_base = OTHER; note = 2'-O-methyl ribonucleotide
  modified_base 93: mod_base = OTHER; note = 2'-O-methyl ribonucleotide
  modified_base 94: mod_base = OTHER; note = 2'-O-methyl ribonucleotide
  modified_base 95: mod_base = OTHER; note = 2'-O-methyl ribonucleotide
  modified_base 96: mod_base = OTHER; note = 2'-O-methyl ribonucleotide
  modified_base 97: mod_base = OTHER; note = 2'-O-methyl ribonucleotide
  modified_base 98: mod_base = OTHER; note = 2'-O-methyl ribonucleotide
  modified_base 99: mod_base = OTHER; note = 2'-O-methyl ribonucleotide
  modified_base 100: mod_base = OTHER; note = 2'-O-methyl ribonucleotide
  modified_base 1..3: mod_base = OTHER; note = phosphorothioate linkage
  modified_base 64..65: mod_base = OTHER; note = phosphorothioate linkage
  modified_base 98..100: mod_base = OTHER; note = phosphorothioate linkage

SEQ ID NO: 2727 - RNA, 103 nt, synthetic construct; identical to SEQ ID NO: 1700
  source 1..103: mol_type = other RNA
  modified_base 1: mod_base = OTHER; note = 2'-O-methyl ribonucleotide
  modified_base 2: mod_base = OTHER; note = 2'-O-methyl ribonucleotide
  modified_base 3: mod_base = OTHER; note = 2'-O-methyl ribonucleotide
  modified_base 21: mod_base = OTHER; note = 2'-O-methyl ribonucleotide
  modified_base 28: mod_base = OTHER; note = 2'-O-methyl ribonucleotide
  modified_base 29: mod_base = OTHER; note = 2'-O-methyl ribonucleotide
  modified_base 30: mod_base = OTHER; note = 2'-O-methyl ribonucleotide
  modified_base 31: mod_base = OTHER; note = 2'-O-methyl ribonucleotide
  modified_base 32: mod_base = OTHER; note = 2'-O-methyl ribonucleotide
  modified_base 33: mod_base = OTHER; note = 2'-O-methyl ribonucleotide
  modified_base 34: mod_base = OTHER; note = 2'-O-methyl ribonucleotide
  modified_base 35: mod_base = OTHER; note = 2'-O-methyl ribonucleotide
  modified_base 36: mod_base = OTHER; note = 2'-O-methyl ribonucleotide
  modified_base 37: mod_base = OTHER; note = 2'-O-methyl ribonucleotide
  modified_base 38: mod_base = OTHER; note = 2'-O-methyl ribonucleotide
  modified_base 39: mod_base = OTHER; note = 2'-O-methyl ribonucleotide
  modified_base 40: mod_base = OTHER; note = 2'-O-methyl ribonucleotide
  modified_base 41: mod_base = OTHER; note = 2'-O-methyl ribonucleotide
  modified_base 42: mod_base = OTHER; note = 2'-O-methyl ribonucleotide
  modified_base 46: mod_base = OTHER; note = 2'-O-methyl ribonucleotide
  modified_base 48: mod_base = OTHER; note = 2'-O-methyl ribonucleotide
  modified_base 50: mod_base = OTHER; note = 2'-O-methyl ribonucleotide
  modified_base 52: mod_base = OTHER; note = 2'-O-methyl ribonucleotide
  modified_base 53: mod_base = OTHER; note = 2'-O-methyl ribonucleotide
  modified_base 54: mod_base = OTHER; note = 2'-O-methyl ribonucleotide
  modified_base 57: mod_base = OTHER; note = 2'-O-methyl ribonucleotide
  modified_base 61: mod_base = OTHER; note = 2'-O-methyl ribonucleotide
  modified_base 66: mod_base = OTHER; note = 2'-O-methyl ribonucleotide
  modified_base 67: mod_base = OTHER; note = 2'-O-methyl ribonucleotide
  modified_base 70: mod_base = OTHER; note = 2'-O-methyl ribonucleotide
  modified_base 71: mod_base = OTHER; note = 2'-O-methyl ribonucleotide
  modified_base 72: mod_base = OTHER; note = 2'-O-methyl ribonucleotide
  modified_base 74: mod_base = OTHER; note = 2'-O-methyl ribonucleotide
  modified_base 75: mod_base = OTHER; note = 2'-O-methyl ribonucleotide
  modified_base 76: mod_base = OTHER; note = 2'-O-methyl ribonucleotide
  modified_base 77: mod_base = OTHER; note = 2'-O-methyl ribonucleotide
  modified_base 78: mod_base = OTHER; note = 2'-O-methyl ribonucleotide
  modified_base 79: mod_base = OTHER; note = 2'-O-methyl ribonucleotide
  modified_base 80: mod_base = OTHER; note = 2'-O-methyl ribonucleotide
  modified_base 82: mod_base = OTHER; note = 2'-O-methyl ribonucleotide
  modified_base 83: mod_base = OTHER; note = 2'-O-methyl ribonucleotide
  modified_base 84: mod_base = OTHER; note = 2'-O-methyl ribonucleotide
  modified_base 85: mod_base = OTHER; note = 2'-O-methyl ribonucleotide
  modified_base 86: mod_base = OTHER; note = 2'-O-methyl ribonucleotide
  modified_base 87: mod_base = OTHER; note = 2'-O-methyl ribonucleotide
  modified_base 89: mod_base = OTHER; note = 2'-O-methyl ribonucleotide
  modified_base 92: mod_base = OTHER; note = 2'-O-methyl ribonucleotide
  modified_base 93: mod_base = OTHER; note = 2'-O-methyl ribonucleotide
  modified_base 94: mod_base = OTHER; note = 2'-O-methyl ribonucleotide
  modified_base 95: mod_base = OTHER; note = 2'-O-methyl ribonucleotide
  modified_base 96: mod_base = OTHER; note = 2'-O-methyl ribonucleotide
  modified_base 97: mod_base = OTHER; note = 2'-O-methyl ribonucleotide
  modified_base 98: mod_base = OTHER; note = 2'-O-methyl ribonucleotide
  modified_base 99: mod_base = OTHER; note = 2'-O-methyl ribonucleotide
  modified_base 100: mod_base = OTHER; note = 2'-O-methyl ribonucleotide
  modified_base 1..3: mod_base = OTHER; note = phosphorothioate linkage
  modified_base 64..65: mod_base = OTHER; note = phosphorothioate linkage
  modified_base 98..100: mod_base = OTHER; note = phosphorothioate linkage

SEQ ID NO: 2728 - RNA, 103 nt, synthetic construct; identical to SEQ ID NO: 1700
  source 1..103: mol_type = other RNA
  modified_base 1: mod_base = OTHER; note = 2'-O-methyl ribonucleotide
  modified_base 2: mod_base = OTHER; note = 2'-O-methyl ribonucleotide
  modified_base 3: mod_base = OTHER; note = 2'-O-methyl ribonucleotide
  modified_base 21: mod_base = OTHER; note = 2'-O-methyl ribonucleotide
  modified_base 28: mod_base = OTHER; note = 2'-O-methyl ribonucleotide
  modified_base 29: mod_base = OTHER; note = 2'-O-methyl ribonucleotide
  modified_base 30: mod_base = OTHER; note = 2'-O-methyl ribonucleotide
  modified_base 31: mod_base = OTHER; note = 2'-O-methyl ribonucleotide
  modified_base 32: mod_base = OTHER; note = 2'-O-methyl ribonucleotide
  modified_base 33: mod_base = OTHER; note = 2'-O-methyl ribonucleotide
  modified_base 34: mod_base = OTHER; note = 2'-O-methyl ribonucleotide
  modified_base 35: mod_base = OTHER; note = 2'-O-methyl ribonucleotide
  modified_base 36: mod_base = OTHER; note = 2'-O-methyl ribonucleotide
  modified_base 37: mod_base = OTHER; note = 2'-O-methyl ribonucleotide
  modified_base 38: mod_base = OTHER; note = 2'-O-methyl ribonucleotide
  modified_base 39: mod_base = OTHER; note = 2'-O-methyl ribonucleotide
  modified_base 40: mod_base = OTHER; note = 2'-O-methyl ribonucleotide
  modified_base 41: mod_base = OTHER; note = 2'-O-methyl ribonucleotide
  modified_base 42: mod_base = OTHER; note = 2'-O-methyl ribonucleotide
  modified_base 46: mod_base = OTHER; note = 2'-O-methyl ribonucleotide
  modified_base 48: mod_base = OTHER; note = 2'-O-methyl ribonucleotide
  modified_base 50: mod_base = OTHER; note = 2'-O-methyl ribonucleotide
  modified_base 52: mod_base = OTHER; note = 2'-O-methyl ribonucleotide
  modified_base 53: mod_base = OTHER; note = 2'-O-methyl ribonucleotide
  modified_base 54: mod_base = OTHER; note = 2'-O-methyl ribonucleotide
  modified_base 55: mod_base = OTHER; note = 2'-O-methyl ribonucleotide
  modified_base 56: mod_base = OTHER; note = 2'-O-methyl ribonucleotide
  modified_base 57: mod_base = OTHER; note = 2'-O-methyl ribonucleotide
  modified_base 60: mod_base = OTHER; note = 2'-O-methyl ribonucleotide
  modified_base 61: mod_base = OTHER; note = 2'-O-methyl ribonucleotide
  modified_base 66: mod_base = OTHER; note = 2'-O-methyl ribonucleotide
  modified_base 67: mod_base = OTHER; note = 2'-O-methyl ribonucleotide
  modified_base 70: mod_base = OTHER; note = 2'-O-methyl ribonucleotide
  modified_base 71: mod_base = OTHER; note = 2'-O-methyl ribonucleotide
  modified_base 72: mod_base = OTHER; note = 2'-O-methyl ribonucleotide
  modified_base 74: mod_base = OTHER; note = 2'-O-methyl ribonucleotide
  modified_base 75: mod_base = OTHER; note = 2'-O-methyl ribonucleotide
  modified_base 76: mod_base = OTHER; note = 2'-O-methyl ribonucleotide
  modified_base 77: mod_base = OTHER; note = 2'-O-methyl ribonucleotide
  modified_base 78: mod_base = OTHER; note = 2'-O-methyl ribonucleotide
  modified_base 79: mod_base = OTHER; note = 2'-O-methyl ribonucleotide
  modified_base 80: mod_base = OTHER; note = 2'-O-methyl ribonucleotide
  modified_base 82: mod_base = OTHER; note = 2'-O-methyl ribonucleotide
  modified_base 83: mod_base = OTHER; note = 2'-O-methyl ribonucleotide
  modified_base 84: mod_base = OTHER; note = 2'-O-methyl ribonucleotide
  modified_base 85: mod_base = OTHER; note = 2'-O-methyl ribonucleotide
  modified_base 86: mod_base = OTHER; note = 2'-O-methyl ribonucleotide
  modified_base 87: mod_base = OTHER; note = 2'-O-methyl ribonucleotide
  modified_base 89: mod_base = OTHER; note = 2'-O-methyl ribonucleotide
  modified_base 92: mod_base = OTHER; note = 2'-O-methyl ribonucleotide
  modified_base 93: mod_base = OTHER; note = 2'-O-methyl ribonucleotide
  modified_base 94: mod_base = OTHER; note = 2'-O-methyl ribonucleotide
  modified_base 95: mod_base = OTHER; note = 2'-O-methyl ribonucleotide
  modified_base 96: mod_base = OTHER; note = 2'-O-methyl ribonucleotide
  modified_base 97: mod_base = OTHER; note = 2'-O-methyl ribonucleotide
  modified_base 98: mod_base = OTHER; note = 2'-O-methyl ribonucleotide
  modified_base 99: mod_base = OTHER; note = 2'-O-methyl ribonucleotide
  modified_base 100: mod_base = OTHER; note = 2'-O-methyl ribonucleotide
  modified_base 1..3: mod_base = OTHER; note = phosphorothioate linkage
  modified_base 64..65: mod_base = OTHER; note = phosphorothioate linkage
  modified_base 98..100: mod_base = OTHER; note = phosphorothioate linkage

SEQ ID NO: 2729 - RNA, 103 nt, synthetic construct; identical to SEQ ID NO: 1700
  source 1..103: mol_type = other RNA
  modified_base 1: mod_base = OTHER; note = 2'-O-methyl ribonucleotide
  modified_base 2: mod_base = OTHER; note = 2'-O-methyl ribonucleotide
  modified_base 3: mod_base = OTHER; note = 2'-O-methyl ribonucleotide
  modified_base 21: mod_base = OTHER; note = 2'-O-methyl ribonucleotide
  modified_base 28: mod_base = OTHER; note = 2'-O-methyl ribonucleotide
  modified_base 29: mod_base = OTHER; note = 2'-O-methyl ribonucleotide
  modified_base 30: mod_base = OTHER; note = 2'-O-methyl ribonucleotide
  modified_base 31: mod_base = OTHER; note = 2'-O-methyl ribonucleotide
  modified_base 32: mod_base = OTHER; note = 2'-O-methyl ribonucleotide
  modified_base 33: mod_base = OTHER; note = 2'-O-methyl ribonucleotide
  modified_base 34: mod_base = OTHER; note = 2'-O-methyl ribonucleotide
  modified_base 35: mod_base = OTHER; note = 2'-O-methyl ribonucleotide
  modified_base 36: mod_base = OTHER; note = 2'-O-methyl ribonucleotide
  modified_base 37: mod_base = OTHER; note = 2'-O-methyl ribonucleotide
  modified_base 38: mod_base = OTHER; note = 2'-O-methyl ribonucleotide
  modified_base 39: mod_base = OTHER; note = 2'-O-methyl ribonucleotide
  modified_base 40: mod_base = OTHER; note = 2'-O-methyl ribonucleotide
  modified_base 41: mod_base = OTHER; note = 2'-O-methyl ribonucleotide
  modified_base 42: mod_base = OTHER; note = 2'-O-methyl ribonucleotide
  modified_base 46: mod_base = OTHER; note = 2'-O-methyl ribonucleotide
  modified_base 48: mod_base = OTHER; note = 2'-O-methyl ribonucleotide
  modified_base 50: mod_base = OTHER; note = 2'-O-methyl ribonucleotide
  modified_base 52: mod_base = OTHER; note = 2'-O-methyl ribonucleotide
  modified_base 53: mod_base = OTHER; note = 2'-O-methyl ribonucleotide
  modified_base 54: mod_base = OTHER; note = 2'-O-methyl ribonucleotide
  modified_base 57: mod_base = OTHER; note = 2'-O-methyl ribonucleotide
  modified_base 61: mod_base = OTHER; note = 2'-O-methyl ribonucleotide
  modified_base 66: mod_base = OTHER; note = 2'-O-methyl ribonucleotide
  modified_base 67: mod_base = OTHER; note = 2'-O-methyl ribonucleotide
  modified_base 70: mod_base = OTHER; note = 2'-O-methyl ribonucleotide
  modified_base 71: mod_base = OTHER; note = 2'-O-methyl ribonucleotide
  modified_base 72: mod_base = OTHER; note = 2'-O-methyl ribonucleotide
  modified_base 73: mod_base = OTHER; note = 2'-O-methyl ribonucleotide
  modified_base 74: mod_base = OTHER; note = 2'-O-methyl ribonucleotide
  modified_base 75: mod_base = OTHER; note = 2'-O-methyl ribonucleotide
  modified_base 76: mod_base = OTHER; note = 2'-O-methyl ribonucleotide
  modified_base 77: mod_base = OTHER; note = 2'-O-methyl ribonucleotide
  modified_base 78: mod_base = OTHER; note = 2'-O-methyl ribonucleotide
  modified_base 79: mod_base = OTHER; note = 2'-O-methyl ribonucleotide
  modified_base 80: mod_base = OTHER; note = 2'-O-methyl ribonucleotide
  modified_base 82: mod_base = OTHER; note = 2'-O-methyl ribonucleotide
  modified_base 83: mod_base = OTHER; note = 2'-O-methyl ribonucleotide
  modified_base 84: mod_base = OTHER; note = 2'-O-methyl ribonucleotide
  modified_base 85: mod_base = OTHER; note = 2'-O-methyl ribonucleotide
  modified_base 86: mod_base = OTHER; note = 2'-O-methyl ribonucleotide
  modified_base 87: mod_base = OTHER; note = 2'-O-methyl ribonucleotide
  modified_base 89: mod_base = OTHER; note = 2'-O-methyl ribonucleotide
  modified_base 92: mod_base = OTHER; note = 2'-O-methyl ribonucleotide
  modified_base 93: mod_base = OTHER; note = 2'-O-methyl ribonucleotide
  modified_base 94: mod_base = OTHER; note = 2'-O-methyl ribonucleotide
  modified_base 95: mod_base = OTHER; note = 2'-O-methyl ribonucleotide
  modified_base 96: mod_base = OTHER; note = 2'-O-methyl ribonucleotide
  modified_base 97: mod_base = OTHER; note = 2'-O-methyl ribonucleotide
  modified_base 98: mod_base = OTHER; note = 2'-O-methyl ribonucleotide
  modified_base 99: mod_base = OTHER; note = 2'-O-methyl ribonucleotide
  modified_base 100: mod_base = OTHER; note = 2'-O-methyl ribonucleotide
  modified_base 1..3: mod_base = OTHER; note = phosphorothioate linkage
  modified_base 64..65: mod_base = OTHER; note = phosphorothioate linkage
  modified_base 98..100: mod_base = OTHER; note = phosphorothioate linkage

SEQ ID NO: 2730 - RNA, 103 nt, synthetic construct; identical to SEQ ID NO: 1700
  source 1..103: mol_type = other RNA
  modified_base 1: mod_base = OTHER; note = 2'-O-methyl ribonucleotide
  modified_base 2: mod_base = OTHER; note = 2'-O-methyl ribonucleotide
  modified_base 3: mod_base = OTHER; note = 2'-O-methyl ribonucleotide
  modified_base 21: mod_base = OTHER; note = 2'-O-methyl ribonucleotide
  modified_base 28: mod_base = OTHER; note = 2'-O-methyl ribonucleotide
  modified_base 29: mod_base = OTHER; note = 2'-O-methyl ribonucleotide
  modified_base 30: mod_base = OTHER; note = 2'-O-methyl ribonucleotide
  modified_base 31: mod_base = OTHER; note = 2'-O-methyl ribonucleotide
  modified_base 32: mod_base = OTHER; note = 2'-O-methyl ribonucleotide
  modified_base 33: mod_base = OTHER; note = 2'-O-methyl ribonucleotide
  modified_base 34: mod_base = OTHER; note = 2'-O-methyl ribonucleotide
  modified_base 35: mod_base = OTHER; note = 2'-O-methyl ribonucleotide
  modified_base 36: mod_base = OTHER; note = 2'-O-methyl ribonucleotide
  modified_base 37: mod_base = OTHER; note = 2'-O-methyl ribonucleotide
  modified_base 38: mod_base = OTHER; note = 2'-O-methyl ribonucleotide
  modified_base 39: mod_base = OTHER; note = 2'-O-methyl ribonucleotide
  modified_base 40: mod_base = OTHER; note = 2'-O-methyl ribonucleotide
  modified_base 41: mod_base = OTHER; note = 2'-O-methyl ribonucleotide
  modified_base 42: mod_base = OTHER; note = 2'-O-methyl ribonucleotide
  modified_base 46: mod_base = OTHER; note = 2'-O-methyl ribonucleotide
  modified_base 48: mod_base = OTHER; note = 2'-O-methyl ribonucleotide
  modified_base 50: mod_base = OTHER; note = 2'-O-methyl ribonucleotide
  modified_base 52: mod_base = OTHER; note = 2'-O-methyl ribonucleotide
  modified_base 53: mod_base = OTHER; note = 2'-O-methyl ribonucleotide
  modified_base 54: mod_base = OTHER; note = 2'-O-methyl ribonucleotide
  modified_base 57: mod_base = OTHER; note = 2'-O-methyl ribonucleotide
  modified_base 61: mod_base = OTHER; note = 2'-O-methyl ribonucleotide
  modified_base 66: mod_base = OTHER; note = 2'-O-methyl ribonucleotide
  modified_base 67: mod_base = OTHER; note = 2'-O-methyl ribonucleotide
  modified_base 70: mod_base = OTHER; note = 2'-O-methyl ribonucleotide
  modified_base 71: mod_base = OTHER; note = 2'-O-methyl ribonucleotide
  modified_base 72: mod_base = OTHER; note = 2'-O-methyl ribonucleotide
  modified_base 73: mod_base = OTHER; note = 2'-O-methyl ribonucleotide
  modified_base 74: mod_base = OTHER; note = 2'-O-methyl ribonucleotide
  modified_base 75: mod_base = OTHER; note = 2'-O-methyl ribonucleotide
  modified_base 76: mod_base = OTHER; note = 2'-O-methyl ribonucleotide
  modified_base 77: mod_base = OTHER; note = 2'-O-methyl ribonucleotide
  modified_base 78: mod_base = OTHER; note = 2'-O-methyl ribonucleotide
  modified_base 79: mod_base = OTHER; note = 2'-O-methyl ribonucleotide
  modified_base 80: mod_base = OTHER; note = 2'-O-methyl ribonucleotide
  modified_base 82: mod_base = OTHER; note = 2'-O-methyl ribonucleotide
  modified_base 83: mod_base = OTHER; note = 2'-O-methyl ribonucleotide
  modified_base 84: mod_base = OTHER; note = 2'-O-methyl ribonucleotide
  modified_base 85: mod_base = OTHER; note = 2'-O-methyl ribonucleotide
  modified_base 86: mod_base = OTHER; note = 2'-O-methyl ribonucleotide
  modified_base 87: mod_base = OTHER; note = 2'-O-methyl ribonucleotide
  modified_base 89: mod_base = OTHER; note = 2'-O-methyl ribonucleotide
  modified_base 91: mod_base = OTHER; note = 2'-O-methyl ribonucleotide
  modified_base 92: mod_base = OTHER; note = 2'-O-methyl ribonucleotide
  modified_base 93: mod_base = OTHER; note = 2'-O-methyl ribonucleotide
  modified_base 94: mod_base = OTHER; note = 2'-O-methyl ribonucleotide
  modified_base 95: mod_base = OTHER; note = 2'-O-methyl ribonucleotide
  modified_base 96: mod_base = OTHER; note = 2'-O-methyl ribonucleotide
  modified_base 97: mod_base = OTHER; note = 2'-O-methyl ribonucleotide
  modified_base 98: mod_base = OTHER; note = 2'-O-methyl ribonucleotide
  modified_base 99: mod_base = OTHER; note = 2'-O-methyl ribonucleotide
  modified_base 100: mod_base = OTHER; note = 2'-O-methyl ribonucleotide
  modified_base 1..3: mod_base = OTHER; note = phosphorothioate linkage
  modified_base 64..65: mod_base = OTHER; note = phosphorothioate linkage
  modified_base 98..100: mod_base = OTHER; note = phosphorothioate linkage

SEQ ID NO: 2731 - RNA, 103 nt, synthetic construct; identical to SEQ ID NO: 1700
  source 1..103: mol_type = other RNA
  modified_base 1: mod_base = OTHER; note = 2'-O-methyl ribonucleotide
  modified_base 2: mod_base = OTHER; note = 2'-O-methyl ribonucleotide
  modified_base 3: mod_base = OTHER; note = 2'-O-methyl ribonucleotide
  modified_base 21: mod_base = OTHER; note = 2'-O-methyl ribonucleotide
  modified_base 28: mod_base = OTHER; note = 2'-O-methyl ribonucleotide
  modified_base 29: mod_base = OTHER; note = 2'-O-methyl ribonucleotide
  modified_base 30: mod_base = OTHER; note = 2'-O-methyl ribonucleotide
  modified_base 31: mod_base = OTHER; note = 2'-O-methyl ribonucleotide
  modified_base 32: mod_base = OTHER; note = 2'-O-methyl ribonucleotide
  modified_base 34: mod_base = OTHER; note = 2'-O-methyl ribonucleotide
  modified_base 35: mod_base = OTHER; note = 2'-O-methyl ribonucleotide
  modified_base 36: mod_base = OTHER; note = 2'-O-methyl ribonucleotide
  modified_base 37: mod_base = OTHER; note = 2'-O-methyl ribonucleotide
  modified_base 38: mod_base = OTHER; note = 2'-O-methyl ribonucleotide
  modified_base 39: mod_base = OTHER; note = 2'-O-methyl ribonucleotide
  modified_base 40: mod_base = OTHER; note = 2'-O-methyl ribonucleotide
  modified_base 41: mod_base = OTHER; note = 2'-O-methyl ribonucleotide
  modified_base 42: mod_base = OTHER; note = 2'-O-methyl ribonucleotide
  modified_base 46: mod_base = OTHER; note = 2'-O-methyl ribonucleotide
  modified_base 48: mod_base = OTHER; note = 2'-O-methyl ribonucleotide
  modified_base 50: mod_base = OTHER; note = 2'-O-methyl ribonucleotide
  modified_base 52: mod_base = OTHER; note = 2'-O-methyl ribonucleotide
  modified_base 53: mod_base = OTHER; note = 2'-O-methyl ribonucleotide
  modified_base 54: mod_base = OTHER; note = 2'-O-methyl ribonucleotide
  modified_base 57: mod_base = OTHER; note = 2'-O-methyl ribonucleotide
  modified_base 61: mod_base = OTHER; note = 2'-O-methyl ribonucleotide
  modified_base 66: mod_base = OTHER; note = 2'-O-methyl ribonucleotide
  modified_base 67: mod_base = OTHER; note = 2'-O-methyl ribonucleotide
  modified_base 70: mod_base = OTHER; note = 2'-O-methyl ribonucleotide
  modified_base 71: mod_base = OTHER; note = 2'-O-methyl ribonucleotide
  modified_base 72: mod_base = OTHER; note = 2'-O-methyl ribonucleotide
  modified_base 73: mod_base = OTHER; note = 2'-O-methyl ribonucleotide
  modified_base 74: mod_base = OTHER; note = 2'-O-methyl ribonucleotide
  modified_base 75: mod_base = OTHER; note = 2'-O-methyl ribonucleotide
  modified_base 76: mod_base = OTHER; note = 2'-O-methyl ribonucleotide
  modified_base 77: mod_base = OTHER; note = 2'-O-methyl ribonucleotide
  modified_base 78: mod_base = OTHER; note = 2'-O-methyl ribonucleotide
  modified_base 79: mod_base = OTHER; note = 2'-O-methyl ribonucleotide
  modified_base 80: mod_base = OTHER; note = 2'-O-methyl ribonucleotide
  modified_base 82: mod_base = OTHER; note = 2'-O-methyl ribonucleotide
  modified_base 83: mod_base = OTHER; note = 2'-O-methyl ribonucleotide
  modified_base 84: mod_base = OTHER; note = 2'-O-methyl ribonucleotide
  modified_base 85: mod_base = OTHER; note = 2'-O-methyl ribonucleotide
  modified_base 86: mod_base = OTHER; note = 2'-O-methyl ribonucleotide
  modified_base 87: mod_base = OTHER; note = 2'-O-methyl ribonucleotide
  modified_base 89: mod_base = OTHER; note = 2'-O-methyl ribonucleotide
  modified_base 92: mod_base = OTHER; note = 2'-O-methyl ribonucleotide
  modified_base 93: mod_base = OTHER; note = 2'-O-methyl ribonucleotide
  modified_base 94: mod_base = OTHER; note = 2'-O-methyl ribonucleotide
  modified_base 95: mod_base = OTHER; note = 2'-O-methyl ribonucleotide
  modified_base 96: mod_base = OTHER; note = 2'-O-methyl ribonucleotide
  modified_base 97: mod_base = OTHER; note = 2'-O-methyl ribonucleotide
  modified_base 98: mod_base = OTHER; note = 2'-O-methyl ribonucleotide
  modified_base 99: mod_base = OTHER; note = 2'-O-methyl ribonucleotide
  modified_base 100: mod_base = OTHER; note = 2'-O-methyl ribonucleotide
  modified_base 1..3: mod_base = OTHER; note = phosphorothioate linkage
  modified_base 64..65: mod_base = OTHER; note = phosphorothioate linkage
  modified_base 98..100: mod_base = OTHER; note = phosphorothioate linkage

SEQ ID NO: 2732 - RNA, 103 nt, synthetic construct; identical to SEQ ID NO: 1700
  source 1..103: mol_type = other RNA
  modified_base 1: mod_base = OTHER; note = 2'-O-methyl ribonucleotide
  modified_base 2: mod_base = OTHER; note = 2'-O-methyl ribonucleotide
  modified_base 3: mod_base = OTHER; note = 2'-O-methyl ribonucleotide
  modified_base 21: mod_base = OTHER; note = 2'-O-methyl ribonucleotide
  modified_base 28: mod_base = OTHER; note = 2'-O-methyl ribonucleotide
  modified_base 29: mod_base = OTHER; note = 2'-O-methyl ribonucleotide
  modified_base 30: mod_base = OTHER; note = 2'-O-methyl ribonucleotide
  modified_base 31: mod_base = OTHER; note = 2'-O-methyl ribonucleotide
  modified_base 32: mod_base = OTHER; note = 2'-O-methyl ribonucleotide
  modified_base 34: mod_base = OTHER; note = 2'-O-methyl ribonucleotide
  modified_base 35: mod_base = OTHER; note = 2'-O-methyl ribonucleotide
  modified_base 36: mod_base = OTHER; note = 2'-O-methyl ribonucleotide
  modified_base 37: mod_base = OTHER; note = 2'-O-methyl ribonucleotide
  modified_base 38: mod_base = OTHER; note = 2'-O-methyl ribonucleotide
  modified_base 39: mod_base = OTHER; note = 2'-O-methyl ribonucleotide
  modified_base 40: mod_base = OTHER; note = 2'-O-methyl ribonucleotide
  modified_base 41: mod_base = OTHER; note = 2'-O-methyl ribonucleotide
  modified_base 42: mod_base = OTHER; note = 2'-O-methyl ribonucleotide
  modified_base 46: mod_base = OTHER; note = 2'-O-methyl ribonucleotide
  modified_base 48: mod_base = OTHER; note = 2'-O-methyl ribonucleotide
  modified_base 50: mod_base = OTHER; note = 2'-O-methyl ribonucleotide
  modified_base 52: mod_base = OTHER; note = 2'-O-methyl ribonucleotide
  modified_base 53: mod_base = OTHER; note = 2'-O-methyl ribonucleotide
  modified_base 54: mod_base = OTHER; note = 2'-O-methyl ribonucleotide
  modified_base 57: mod_base = OTHER; note = 2'-O-methyl ribonucleotide
  modified_base 61: mod_base = OTHER; note = 2'-O-methyl ribonucleotide
  modified_base 66: mod_base = OTHER; note = 2'-O-methyl ribonucleotide
  modified_base 67: mod_base = OTHER; note = 2'-O-methyl ribonucleotide
  modified_base 70: mod_base = OTHER; note = 2'-O-methyl ribonucleotide
  modified_base 71: mod_base = OTHER; note = 2'-O-methyl ribonucleotide
  modified_base 72: mod_base = OTHER; note = 2'-O-methyl ribonucleotide
  modified_base 73: mod_base = OTHER; note = 2'-O-methyl ribonucleotide
  modified_base 74: mod_base = OTHER; note = 2'-O-methyl ribonucleotide
  modified_base 75: mod_base = OTHER; note = 2'-O-methyl ribonucleotide
  modified_base 76: mod_base = OTHER; note = 2'-O-methyl ribonucleotide
  modified_base 77: mod_base = OTHER; note = 2'-O-methyl ribonucleotide
  modified_base 78: mod_base = OTHER; note = 2'-O-methyl ribonucleotide
  modified_base 79: mod_base = OTHER; note = 2'-O-methyl ribonucleotide
  modified_base 80: mod_base = OTHER; note = 2'-O-methyl ribonucleotide
  modified_base 82: mod_base = OTHER; note = 2'-O-methyl ribonucleotide
  modified_base 83: mod_base = OTHER; note = 2'-O-methyl ribonucleotide
  modified_base 84: mod_base = OTHER; note = 2'-O-methyl ribonucleotide
  modified_base 85: mod_base = OTHER; note = 2'-O-methyl ribonucleotide
  modified_base 86: mod_base = OTHER; note = 2'-O-methyl ribonucleotide
  modified_base 87: mod_base = OTHER; note = 2'-O-methyl ribonucleotide
  modified_base 89: mod_base = OTHER; note = 2'-O-methyl ribonucleotide
  modified_base 91: mod_base = OTHER; note = 2'-O-methyl ribonucleotide
  modified_base 92: mod_base = OTHER; note = 2'-O-methyl ribonucleotide
  modified_base 93: mod_base = OTHER; note = 2'-O-methyl ribonucleotide
  modified_base 94: mod_base = OTHER; note = 2'-O-methyl ribonucleotide
  modified_base 95: mod_base = OTHER; note = 2'-O-methyl ribonucleotide
  modified_base 96: mod_base = OTHER; note = 2'-O-methyl ribonucleotide
  modified_base 97: mod_base = OTHER; note = 2'-O-methyl ribonucleotide
  modified_base 98: mod_base = OTHER; note = 2'-O-methyl ribonucleotide
  modified_base 99: mod_base = OTHER; note = 2'-O-methyl ribonucleotide
  modified_base 100: mod_base = OTHER; note = 2'-O-methyl ribonucleotide
  modified_base 1..3: mod_base = OTHER; note = phosphorothioate linkage
  modified_base 64..65: mod_base = OTHER; note = phosphorothioate linkage
  modified_base 98..100: mod_base = OTHER; note = phosphorothioate linkage

SEQ ID NO: 2733 - RNA, 103 nt, synthetic construct; identical to SEQ ID NO: 1700
  source 1..103: mol_type = other RNA
  modified_base 1: mod_base = OTHER; note = 2'-O-methyl ribonucleotide
  modified_base 2: mod_base = OTHER; note = 2'-O-methyl ribonucleotide
  modified_base 3: mod_base = OTHER; note = 2'-O-methyl ribonucleotide
  modified_base 21: mod_base = OTHER; note = 2'-O-methyl ribonucleotide
  modified_base 28: mod_base = OTHER; note = 2'-O-methyl ribonucleotide
  modified_base 29: mod_base = OTHER; note = 2'-O-methyl ribonucleotide
  modified_base 30: mod_base = OTHER; note = 2'-O-methyl ribonucleotide
  modified_base 31: mod_base = OTHER; note = 2'-O-methyl ribonucleotide
  modified_base 32: mod_base = OTHER; note = 2'-O-methyl ribonucleotide
  modified_base 34: mod_base = OTHER; note = 2'-O-methyl ribonucleotide
  modified_base 35: mod_base = OTHER; note = 2'-O-methyl ribonucleotide
  modified_base 36: mod_base = OTHER; note = 2'-O-methyl ribonucleotide
  modified_base 37: mod_base = OTHER; note = 2'-O-methyl ribonucleotide
  modified_base 38: mod_base = OTHER; note = 2'-O-methyl ribonucleotide
  modified_base 39: mod_base = OTHER; note = 2'-O-methyl ribonucleotide
  modified_base 40: mod_base = OTHER; note = 2'-O-methyl ribonucleotide
  modified_base 41: mod_base = OTHER; note = 2'-O-methyl ribonucleotide
  modified_base 42: mod_base = OTHER; note = 2'-O-methyl ribonucleotide
  modified_base 46: mod_base = OTHER; note = 2'-O-methyl ribonucleotide
  modified_base 48: mod_base = OTHER; note = 2'-O-methyl ribonucleotide
  modified_base 50: mod_base = OTHER; note = 2'-O-methyl ribonucleotide
  modified_base 52: mod_base = OTHER; note = 2'-O-methyl ribonucleotide
  modified_base 53: mod_base = OTHER; note = 2'-O-methyl ribonucleotide
  modified_base 54: mod_base = OTHER; note = 2'-O-methyl ribonucleotide
  modified_base 55: mod_base = OTHER; note = 2'-O-methyl ribonucleotide
  modified_base 56: mod_base = OTHER; note = 2'-O-methyl ribonucleotide
  modified_base 57: mod_base = OTHER; note = 2'-O-methyl ribonucleotide
  modified_base 60: mod_base = OTHER; note = 2'-O-methyl ribonucleotide
  modified_base 61: mod_base = OTHER; note = 2'-O-methyl ribonucleotide
  modified_base 66: mod_base = OTHER; note = 2'-O-methyl ribonucleotide
  modified_base 67: mod_base = OTHER; note = 2'-O-methyl ribonucleotide
  modified_base 70: mod_base = OTHER; note = 2'-O-methyl ribonucleotide
  modified_base 71: mod_base = OTHER; note = 2'-O-methyl ribonucleotide
  modified_base 72: mod_base = OTHER; note = 2'-O-methyl ribonucleotide
  modified_base 74: mod_base = OTHER; note = 2'-O-methyl ribonucleotide
  modified_base 75: mod_base = OTHER; note = 2'-O-methyl ribonucleotide
  modified_base 76: mod_base = OTHER; note = 2'-O-methyl ribonucleotide
  modified_base 77: mod_base = OTHER; note = 2'-O-methyl ribonucleotide
  modified_base 78: mod_base = OTHER; note = 2'-O-methyl ribonucleotide
  modified_base 79: mod_base = OTHER; note = 2'-O-methyl ribonucleotide
  modified_base 80: mod_base = OTHER; note = 2'-O-methyl ribonucleotide
  modified_base 82: mod_base = OTHER; note = 2'-O-methyl ribonucleotide
  modified_base 83: mod_base = OTHER; note = 2'-O-methyl ribonucleotide
  modified_base 84: mod_base = OTHER; note = 2'-O-methyl ribonucleotide
  modified_base 85: mod_base = OTHER; note = 2'-O-methyl ribonucleotide
  modified_base 86: mod_base = OTHER; note = 2'-O-methyl ribonucleotide
  modified_base 87: mod_base = OTHER; note = 2'-O-methyl ribonucleotide
  modified_base 89: mod_base = OTHER; note = 2'-O-methyl ribonucleotide
  modified_base 92: mod_base = OTHER; note = 2'-O-methyl ribonucleotide
  modified_base 93: mod_base = OTHER; note = 2'-O-methyl ribonucleotide
  modified_base 94: mod_base = OTHER; note = 2'-O-methyl ribonucleotide
  modified_base 95: mod_base = OTHER; note = 2'-O-methyl ribonucleotide
  modified_base 96: mod_base = OTHER; note = 2'-O-methyl ribonucleotide
  modified_base 97: mod_base = OTHER; note = 2'-O-methyl ribonucleotide
  modified_base 98: mod_base = OTHER; note = 2'-O-methyl ribonucleotide
  modified_base 99: mod_base = OTHER; note = 2'-O-methyl ribonucleotide
  modified_base 100: mod_base = OTHER; note = 2'-O-methyl ribonucleotide
  modified_base 1..3: mod_base = OTHER; note = phosphorothioate linkage
  modified_base 64..65: mod_base = OTHER; note = phosphorothioate linkage
  modified_base 98..100: mod_base = OTHER; note = phosphorothioate linkage

SEQ ID NO: 2734 - RNA, 103 nt, synthetic construct; identical to SEQ ID NO: 1643
  source 1..103: mol_type = other RNA
  modified_base 1: mod_base = OTHER; note = 2'-O-methyl ribonucleotide
  modified_base 2: mod_base = OTHER; note = 2'-O-methyl ribonucleotide
  modified_base 3: mod_base = OTHER; note = 2'-O-methyl ribonucleotide
  modified_base 21: mod_base = OTHER; note = 2'-O-methyl ribonucleotide
  modified_base 28: mod_base = OTHER; note = 2'-O-methyl ribonucleotide
  modified_base 29: mod_base = OTHER; note = 2'-O-methyl ribonucleotide
  modified_base 30: mod_base = OTHER; note = 2'-O-methyl ribonucleotide
  modified_base 31: mod_base = OTHER; note = 2'-O-methyl ribonucleotide
  modified_base 32: mod_base = OTHER; note = 2'-O-methyl ribonucleotide
  modified_base 33: mod_base = OTHER; note = 2'-O-methyl ribonucleotide
  modified_base 34: mod_base = OTHER; note = 2'-O-methyl ribonucleotide
  modified_base 35: mod_base = OTHER; note = 2'-O-methyl ribonucleotide
  modified_base 36: mod_base = OTHER; note = 2'-O-methyl ribonucleotide
  modified_base 37: mod_base = OTHER; note = 2'-O-methyl ribonucleotide
  modified_base 38: mod_base = OTHER; note = 2'-O-methyl ribonucleotide
  modified_base 39: mod_base = OTHER; note = 2'-O-methyl ribonucleotide
  modified_base 40: mod_base = OTHER; note = 2'-O-methyl ribonucleotide
  modified_base 41: mod_base = OTHER; note = 2'-O-methyl ribonucleotide
  modified_base 42: mod_base = OTHER; note = 2'-O-methyl ribonucleotide
  modified_base 46: mod_base = OTHER; note = 2'-O-methyl ribonucleotide
  modified_base 48: mod_base = OTHER; note = 2'-O-methyl ribonucleotide
  modified_base 50: mod_base = OTHER; note = 2'-O-methyl ribonucleotide
  modified_base 52: mod_base = OTHER; note = 2'-O-methyl ribonucleotide
  modified_base 53: mod_base = OTHER; note = 2'-O-methyl ribonucleotide
  modified_base 54: mod_base = OTHER; note = 2'-O-methyl ribonucleotide
  modified_base 55: mod_base = OTHER; note = 2'-O-methyl ribonucleotide
  modified_base 56: mod_base = OTHER; note = 2'-O-methyl ribonucleotide
  modified_base 57: mod_base = OTHER; note = 2'-O-methyl ribonucleotide
  modified_base 60: mod_base = OTHER; note = 2'-O-methyl ribonucleotide
  modified_base 61: mod_base = OTHER; note = 2'-O-methyl ribonucleotide
  modified_base 66: mod_base = OTHER; note = 2'-O-methyl ribonucleotide
  modified_base 67: mod_base = OTHER; note = 2'-O-methyl ribonucleotide
  modified_base 70: mod_base = OTHER; note = 2'-O-methyl ribonucleotide
  modified_base 71: mod_base = OTHER; note = 2'-O-methyl ribonucleotide
  modified_base 72: mod_base = OTHER; note = 2'-O-methyl ribonucleotide
  modified_base 73: mod_base = OTHER; note = 2'-O-methyl ribonucleotide
  modified_base 74: mod_base = OTHER; note = 2'-O-methyl ribonucleotide
  modified_base 75: mod_base = OTHER; note = 2'-O-methyl ribonucleotide
  modified_base 76: mod_base = OTHER; note = 2'-O-methyl ribonucleotide
  modified_base 77: mod_base = OTHER; note = 2'-O-methyl ribonucleotide
  modified_base 78: mod_base = OTHER; note = 2'-O-methyl ribonucleotide
  modified_base 79: mod_base = OTHER; note = 2'-O-methyl ribonucleotide
  modified_base 80: mod_base = OTHER; note = 2'-O-methyl ribonucleotide
  modified_base 81: mod_base = OTHER; note = 2'-O-methyl ribonucleotide
  modified_base 83: mod_base = OTHER; note = 2'-O-methyl ribonucleotide
  modified_base 84: mod_base = OTHER; note = 2'-O-methyl ribonucleotide
  modified_base 85: mod_base = OTHER; note = 2'-O-methyl ribonucleotide
  modified_base 86: mod_base = OTHER; note = 2'-O-methyl ribonucleotide
  modified_base 87: mod_base = OTHER; note = 2'-O-methyl ribonucleotide
  modified_base 88: mod_base = OTHER; note = 2'-O-methyl ribonucleotide
  modified_base 89: mod_base = OTHER; note = 2'-O-methyl ribonucleotide
  modified_base 90: mod_base = OTHER; note = 2'-O-methyl ribonucleotide
  modified_base 91: mod_base = OTHER; note = 2'-O-methyl ribonucleotide
  modified_base 92: mod_base = OTHER; note = 2'-O-methyl ribonucleotide
  modified_base 93: mod_base = OTHER; note = 2'-O-methyl ribonucleotide
  modified_base 94: mod_base = OTHER; note = 2'-O-methyl ribonucleotide
  modified_base 95: mod_base = OTHER; note = 2'-O-methyl ribonucleotide
  modified_base 96: mod_base = OTHER; note = 2'-O-methyl ribonucleotide
  modified_base 97: mod_base = OTHER; note = 2'-O-methyl ribonucleotide
  modified_base 98: mod_base = OTHER; note = 2'-O-methyl ribonucleotide
  modified_base 99: mod_base = OTHER; note = 2'-O-methyl ribonucleotide
  modified_base 100: mod_base = OTHER; note = 2'-O-methyl ribonucleotide
  modified_base 1..3: mod_base = OTHER; note = phosphorothioate linkage
  modified_base 45..46: mod_base = OTHER; note = phosphorothioate linkage
  modified_base 98..100: mod_base = OTHER; note = phosphorothioate linkage

SEQ ID NO: 2735 - RNA, 103 nt, synthetic construct; identical to SEQ ID NO: 1643
  source 1..103: mol_type = other RNA
  modified_base 1: mod_base = OTHER; note = 2'-O-methyl ribonucleotide
  modified_base 2: mod_base = OTHER; note = 2'-O-methyl ribonucleotide
  modified_base 3: mod_base = OTHER; note = 2'-O-methyl ribonucleotide
  modified_base 21: mod_base = OTHER; note = 2'-O-methyl ribonucleotide
  modified_base 28: mod_base = OTHER; note = 2'-O-methyl ribonucleotide
  modified_base 29: mod_base = OTHER; note = 2'-O-methyl ribonucleotide
  modified_base 30: mod_base = OTHER; note = 2'-O-methyl ribonucleotide
  modified_base 31: mod_base = OTHER; note = 2'-O-methyl ribonucleotide
  modified_base 32: mod_base = OTHER; note = 2'-O-methyl ribonucleotide
  modified_base 34: mod_base = OTHER; note = 2'-O-methyl ribonucleotide
  modified_base 35: mod_base = OTHER; note = 2'-O-methyl ribonucleotide
  modified_base 36: mod_base = OTHER; note = 2'-O-methyl ribonucleotide
  modified_base 37: mod_base = OTHER; note = 2'-O-methyl ribonucleotide
  modified_base 38: mod_base = OTHER; note = 2'-O-methyl ribonucleotide
  modified_base 39: mod_base = OTHER; note = 2'-O-methyl ribonucleotide
  modified_base 40: mod_base = OTHER; note = 2'-O-methyl ribonucleotide
  modified_base 41: mod_base = OTHER; note = 2'-O-methyl ribonucleotide
  modified_base 42: mod_base = OTHER; note = 2'-O-methyl ribonucleotide
  modified_base 46: mod_base = OTHER; note = 2'-O-methyl ribonucleotide
  modified_base 48: mod_base = OTHER; note = 2'-O-methyl ribonucleotide
  modified_base 50: mod_base = OTHER; note = 2'-O-methyl ribonucleotide
  modified_base 52: mod_base = OTHER; note = 2'-O-methyl ribonucleotide
  modified_base 53: mod_base = OTHER; note = 2'-O-methyl ribonucleotide
  modified_base 54: mod_base = OTHER; note = 2'-O-methyl ribonucleotide
  modified_base 55: mod_base = OTHER; note = 2'-O-methyl ribonucleotide
  modified_base 56: mod_base = OTHER; note = 2'-O-methyl ribonucleotide
  modified_base 57: mod_base = OTHER; note = 2'-O-methyl ribonucleotide
  modified_base 60: mod_base = OTHER; note = 2'-O-methyl ribonucleotide
  modified_base 61: mod_base = OTHER; note = 2'-O-methyl ribonucleotide
  modified_base 66: mod_base = OTHER; note = 2'-O-methyl ribonucleotide
  modified_base 67: mod_base = OTHER; note = 2'-O-methyl ribonucleotide
  modified_base 70: mod_base = OTHER; note = 2'-O-methyl ribonucleotide
  modified_base 71: mod_base = OTHER; note = 2'-O-methyl ribonucleotide
  modified_base 72: mod_base = OTHER; note = 2'-O-methyl ribonucleotide
  modified_base 74: mod_base = OTHER; note = 2'-O-methyl ribonucleotide
  modified_base 75: mod_base = OTHER; note = 2'-O-methyl ribonucleotide
  modified_base 76: mod_base = OTHER; note = 2'-O-methyl ribonucleotide
  modified_base 77: mod_base = OTHER; note = 2'-O-methyl ribonucleotide
  modified_base 78: mod_base = OTHER; note = 2'-O-methyl ribonucleotide
  modified_base 79: mod_base = OTHER; note = 2'-O-methyl ribonucleotide
  modified_base 80: mod_base = OTHER; note = 2'-O-methyl ribonucleotide
  modified_base 81: mod_base = OTHER; note = 2'-O-methyl ribonucleotide
  modified_base 83: mod_base = OTHER; note = 2'-O-methyl ribonucleotide
  modified_base 84: mod_base = OTHER; note = 2'-O-methyl ribonucleotide
  modified_base 85: mod_base = OTHER; note = 2'-O-methyl ribonucleotide
  modified_base 86: mod_base = OTHER; note = 2'-O-methyl ribonucleotide
  modified_base 87: mod_base = OTHER; note = 2'-O-methyl ribonucleotide
  modified_base 88: mod_base = OTHER; note = 2'-O-methyl ribonucleotide
  modified_base 89: mod_base = OTHER; note = 2'-O-methyl ribonucleotide
  modified_base 90: mod_base = OTHER; note = 2'-O-methyl ribonucleotide
  modified_base 91: mod_base = OTHER; note = 2'-O-methyl ribonucleotide
  modified_base 92: mod_base = OTHER; note = 2'-O-methyl ribonucleotide
  modified_base 93: mod_base = OTHER; note = 2'-O-methyl ribonucleotide
  modified_base 94: mod_base = OTHER; note = 2'-O-methyl ribonucleotide
  modified_base 95: mod_base = OTHER; note = 2'-O-methyl ribonucleotide
  modified_base 96: mod_base = OTHER; note = 2'-O-methyl ribonucleotide
  modified_base 97: mod_base = OTHER; note = 2'-O-methyl ribonucleotide
  modified_base 98: mod_base = OTHER; note = 2'-O-methyl ribonucleotide
  modified_base 99: mod_base = OTHER; note = 2'-O-methyl ribonucleotide
  modified_base 100: mod_base = OTHER; note = 2'-O-methyl ribonucleotide
  modified_base 1..3: mod_base = OTHER; note = phosphorothioate linkage
  modified_base 45..46: mod_base = OTHER; note = phosphorothioate linkage
  modified_base 98..100: mod_base = OTHER; note = phosphorothioate linkage

SEQ ID NO: 2736 - RNA, 103 nt, synthetic construct; identical to SEQ ID NO: 1699
  source 1..103: mol_type = other RNA
  modified_base 1: mod_base = OTHER; note = 2'-O-methyl ribonucleotide
  modified_base 2: mod_base = OTHER; note = 2'-O-methyl ribonucleotide
  modified_base 3: mod_base = OTHER; note = 2'-O-methyl ribonucleotide
  modified_base 21: mod_base = OTHER; note = 2'-O-methyl ribonucleotide
  modified_base 28: mod_base = OTHER; note = 2'-O-methyl ribonucleotide
  modified_base 29: mod_base = OTHER; note = 2'-O-methyl ribonucleotide
  modified_base 30: mod_base = OTHER; note = 2'-O-methyl ribonucleotide
  modified_base 31: mod_base = OTHER; note = 2'-O-methyl ribonucleotide
  modified_base 32: mod_base = OTHER; note = 2'-O-methyl ribonucleotide
  modified_base 33: mod_base = OTHER; note = 2'-O-methyl ribonucleotide
  modified_base 34: mod_base = OTHER; note = 2'-O-methyl ribonucleotide
  modified_base 35: mod_base = OTHER; note = 2'-O-methyl ribonucleotide
  modified_base 36: mod_base = OTHER; note = 2'-O-methyl ribonucleotide
  modified_base 37: mod_base = OTHER; note = 2'-O-methyl ribonucleotide
  modified_base 38: mod_base = OTHER; note = 2'-O-methyl ribonucleotide
  modified_base 39: mod_base = OTHER; note = 2'-O-methyl ribonucleotide
  modified_base 40: mod_base = OTHER; note = 2'-O-methyl ribonucleotide
  modified_base 41: mod_base = OTHER; note = 2'-O-methyl ribonucleotide
  modified_base 42: mod_base = OTHER; note = 2'-O-methyl ribonucleotide
  modified_base 46: mod_base = OTHER; note = 2'-O-methyl ribonucleotide
  modified_base 48: mod_base = OTHER; note = 2'-O-methyl ribonucleotide
  modified_base 50: mod_base = OTHER; note = 2'-O-methyl ribonucleotide
  modified_base 52: mod_base = OTHER; note = 2'-O-methyl ribonucleotide
  modified_base 53: mod_base = OTHER; note = 2'-O-methyl ribonucleotide
  modified_base 54: mod_base = OTHER; note = 2'-O-methyl ribonucleotide
  modified_base 55: mod_base = OTHER; note = 2'-O-methyl ribonucleotide
  modified_base 56: mod_base = OTHER; note = 2'-O-methyl ribonucleotide
  modified_base 57: mod_base = OTHER; note = 2'-O-methyl ribonucleotide
  modified_base 60: mod_base = OTHER; note = 2'-O-methyl ribonucleotide
  modified_base 61: mod_base = OTHER; note = 2'-O-methyl ribonucleotide
  modified_base 66: mod_base = OTHER; note = 2'-O-methyl ribonucleotide
  modified_base 67: mod_base = OTHER; note = 2'-O-methyl ribonucleotide
  modified_base 70: mod_base = OTHER; note = 2'-O-methyl ribonucleotide
  modified_base 71: mod_base = OTHER; note = 2'-O-methyl ribonucleotide
  modified_base 72: mod_base = OTHER; note = 2'-O-methyl ribonucleotide
  modified_base 73: mod_base = OTHER; note = 2'-O-methyl ribonucleotide
  modified_base 74: mod_base = OTHER; note = 2'-O-methyl ribonucleotide
  modified_base 75: mod_base = OTHER; note = 2'-O-methyl ribonucleotide
  modified_base 76: mod_base = OTHER; note = 2'-O-methyl ribonucleotide
  modified_base 77: mod_base = OTHER; note = 2'-O-methyl ribonucleotide
  modified_base 78: mod_base = OTHER; note = 2'-O-methyl ribonucleotide
  modified_base 79: mod_base = OTHER; note = 2'-O-methyl ribonucleotide
  modified_base 80: mod_base = OTHER; note = 2'-O-methyl ribonucleotide
  modified_base 81: mod_base = OTHER; note = 2'-O-methyl ribonucleotide
  modified_base 83: mod_base = OTHER; note = 2'-O-methyl ribonucleotide
  modified_base 84: mod_base = OTHER; note = 2'-O-methyl ribonucleotide
  modified_base 85: mod_base = OTHER; note = 2'-O-methyl ribonucleotide
  modified_base 86: mod_base = OTHER; note = 2'-O-methyl ribonucleotide
  modified_base 87: mod_base = OTHER; note = 2'-O-methyl ribonucleotide
  modified_base 88: mod_base = OTHER; note = 2'-O-methyl ribonucleotide
  modified_base 89: mod_base = OTHER; note = 2'-O-methyl ribonucleotide
  modified_base 90: mod_base = OTHER; note = 2'-O-methyl ribonucleotide
  modified_base 91: mod_base = OTHER; note = 2'-O-methyl ribonucleotide
  modified_base 92: mod_base = OTHER; note = 2'-O-methyl ribonucleotide
  modified_base 93: mod_base = OTHER; note = 2'-O-methyl ribonucleotide
  modified_base 94: mod_base = OTHER; note = 2'-O-methyl ribonucleotide
  modified_base 95: mod_base = OTHER; note = 2'-O-methyl ribonucleotide
  modified_base 96: mod_base = OTHER; note = 2'-O-methyl ribonucleotide
  modified_base 97: mod_base = OTHER; note = 2'-O-methyl ribonucleotide
  modified_base 98: mod_base = OTHER; note = 2'-O-methyl ribonucleotide
  modified_base 99: mod_base = OTHER; note = 2'-O-methyl ribonucleotide
  modified_base 100: mod_base = OTHER; note = 2'-O-methyl ribonucleotide
  modified_base 1..3: mod_base = OTHER; note = phosphorothioate linkage
  modified_base 45..46: mod_base = OTHER; note = phosphorothioate linkage
  modified_base 98..100: mod_base = OTHER; note = phosphorothioate linkage

SEQ ID NO: 2737 - RNA, 103 nt, synthetic construct; identical to SEQ ID NO: 1700
  source 1..103: mol_type = other RNA
  modified_base 1: mod_base = OTHER; note = 2'-O-methyl ribonucleotide
  modified_base 2: mod_base = OTHER; note = 2'-O-methyl ribonucleotide
  modified_base 3: mod_base = OTHER; note = 2'-O-methyl ribonucleotide
  modified_base 21: mod_base = OTHER; note = 2'-O-methyl ribonucleotide
  modified_base 28: mod_base = OTHER; note = 2'-O-methyl ribonucleotide
  modified_base 29: mod_base = OTHER; note = 2'-O-methyl ribonucleotide
  modified_base 30: mod_base = OTHER; note = 2'-O-methyl ribonucleotide
  modified_base 31: mod_base = OTHER; note = 2'-O-methyl ribonucleotide
  modified_base 32: mod_base = OTHER; note = 2'-O-methyl ribonucleotide
  modified_base 33: mod_base = OTHER; note = 2'-O-methyl ribonucleotide
  modified_base 34: mod_base = OTHER; note = 2'-O-methyl ribonucleotide
  modified_base 35: mod_base = OTHER; note = 2'-O-methyl ribonucleotide
  modified_base 36: mod_base = OTHER; note = 2'-O-methyl ribonucleotide
  modified_base 37: mod_base = OTHER; note = 2'-O-methyl ribonucleotide
  modified_base 38: mod_base = OTHER; note = 2'-O-methyl ribonucleotide
  modified_base 39: mod_base = OTHER; note = 2'-O-methyl ribonucleotide
  modified_base 40: mod_base = OTHER; note = 2'-O-methyl ribonucleotide
  modified_base 41: mod_base = OTHER; note = 2'-O-methyl ribonucleotide
  modified_base 42: mod_base = OTHER; note = 2'-O-methyl ribonucleotide
  modified_base 46: mod_base = OTHER; note = 2'-O-methyl ribonucleotide
  modified_base 48: mod_base = OTHER; note = 2'-O-methyl ribonucleotide
  modified_base 50: mod_base = OTHER; note = 2'-O-methyl ribonucleotide
  modified_base 52: mod_base = OTHER; note = 2'-O-methyl ribonucleotide
  modified_base 53: mod_base = OTHER; note = 2'-O-methyl ribonucleotide
  modified_base 54: mod_base = OTHER; note = 2'-O-methyl ribonucleotide
  modified_base 57: mod_base = OTHER; note = 2'-O-methyl ribonucleotide
  modified_base 61: mod_base = OTHER; note = 2'-O-methyl ribonucleotide
  modified_base 66: mod_base = OTHER; note = 2'-O-methyl ribonucleotide
  modified_base 67: mod_base = OTHER; note = 2'-O-methyl ribonucleotide
  modified_base 70: mod_base = OTHER; note = 2'-O-methyl ribonucleotide
  modified_base 71: mod_base = OTHER; note = 2'-O-methyl ribonucleotide
  modified_base 72: mod_base = OTHER; note = 2'-O-methyl ribonucleotide
  modified_base 74: mod_base = OTHER; note = 2'-O-methyl ribonucleotide
  modified_base 75: mod_base = OTHER; note = 2'-O-methyl ribonucleotide
  modified_base 76: mod_base = OTHER; note = 2'-O-methyl ribonucleotide
  modified_base 77: mod_base = OTHER; note = 2'-O-methyl ribonucleotide
  modified_base 78: mod_base = OTHER; note = 2'-O-methyl ribonucleotide
  modified_base 79: mod_base = OTHER; note = 2'-O-methyl ribonucleotide
  modified_base 80: mod_base = OTHER; note = 2'-O-methyl ribonucleotide
  modified_base 82: mod_base = OTHER; note = 2'-O-methyl ribonucleotide
  modified_base 83: mod_base = OTHER; note = 2'-O-methyl ribonucleotide
  modified_base 84: mod_base = OTHER; note = 2'-O-methyl ribonucleotide
  modified_base 85: mod_base = OTHER; note = 2'-O-methyl ribonucleotide
  modified_base 86: mod_base = OTHER; note = 2'-O-methyl ribonucleotide
  modified_base 87: mod_base = OTHER; note = 2'-O-methyl ribonucleotide
  modified_base 89: mod_base = OTHER; note = 2'-O-methyl ribonucleotide
  modified_base 92: mod_base = OTHER; note = 2'-O-methyl ribonucleotide
  modified_base 93: mod_base = OTHER; note = 2'-O-methyl ribonucleotide
  modified_base 94: mod_base = OTHER; note = 2'-O-methyl ribonucleotide
  modified_base 95: mod_base = OTHER; note = 2'-O-methyl ribonucleotide
  modified_base 96: mod_base = OTHER; note = 2'-O-methyl ribonucleotide
  modified_base 97: mod_base = OTHER; note = 2'-O-methyl ribonucleotide
  modified_base 98: mod_base = OTHER; note = 2'-O-methyl ribonucleotide
  modified_base 99: mod_base = OTHER; note = 2'-O-methyl ribonucleotide
  modified_base 100: mod_base = OTHER; note = 2'-O-methyl ribonucleotide
  modified_base 1..3: mod_base = OTHER; note = phosphorothioate linkage
  modified_base 45..46: mod_base = OTHER; note = phosphorothioate linkage
  modified_base 98..100: mod_base = OTHER; note = phosphorothioate linkage

SEQ ID NO: 2738 - RNA, 103 nt, synthetic construct; identical to SEQ ID NO: 1700
  source 1..103: mol_type = other RNA
  modified_base 1: mod_base = OTHER; note = 2'-O-methyl ribonucleotide
  modified_base 2: mod_base = OTHER; note = 2'-O-methyl ribonucleotide
  modified_base 3: mod_base = OTHER; note = 2'-O-methyl ribonucleotide
  modified_base 21: mod_base = OTHER; note = 2'-O-methyl ribonucleotide
  modified_base 28: mod_base = OTHER; note = 2'-O-methyl ribonucleotide
  modified_base 29: mod_base = OTHER; note = 2'-O-methyl ribonucleotide
  modified_base 30: mod_base = OTHER; note = 2'-O-methyl ribonucleotide
  modified_base 31: mod_base = OTHER; note = 2'-O-methyl ribonucleotide
  modified_base 32: mod_base = OTHER; note = 2'-O-methyl ribonucleotide
  modified_base 33: mod_base = OTHER; note = 2'-O-methyl ribonucleotide
  modified_base 34: mod_base = OTHER; note = 2'-O-methyl ribonucleotide
  modified_base 35: mod_base = OTHER; note = 2'-O-methyl ribonucleotide
  modified_base 36: mod_base = OTHER; note = 2'-O-methyl ribonucleotide
  modified_base 37: mod_base = OTHER; note = 2'-O-methyl ribonucleotide
  modified_base 38: mod_base = OTHER; note = 2'-O-methyl ribonucleotide
  modified_base 39: mod_base = OTHER; note = 2'-O-methyl ribonucleotide
  modified_base 40: mod_base = OTHER; note = 2'-O-methyl ribonucleotide
  modified_base 41: mod_base = OTHER; note = 2'-O-methyl ribonucleotide
  modified_base 42: mod_base = OTHER; note = 2'-O-methyl ribonucleotide
  modified_base 46: mod_base = OTHER; note = 2'-O-methyl ribonucleotide
  modified_base 48: mod_base = OTHER; note = 2'-O-methyl ribonucleotide
  modified_base 50: mod_base = OTHER; note = 2'-O-methyl ribonucleotide
  modified_base 52: mod_base = OTHER; note = 2'-O-methyl ribonucleotide
  modified_base 53: mod_base = OTHER; note = 2'-O-methyl ribonucleotide
  modified_base 54: mod_base = OTHER; note = 2'-O-methyl ribonucleotide
  modified_base 55: mod_base = OTHER; note = 2'-O-methyl ribonucleotide
  modified_base 56: mod_base = OTHER; note = 2'-O-methyl ribonucleotide
  modified_base 57: mod_base = OTHER; note = 2'-O-methyl ribonucleotide
  modified_base 60: mod_base = OTHER; note = 2'-O-methyl ribonucleotide
  modified_base 61: mod_base = OTHER; note = 2'-O-methyl ribonucleotide
  modified_base 66: mod_base = OTHER; note = 2'-O-methyl ribonucleotide
  modified_base 67: mod_base = OTHER; note = 2'-O-methyl ribonucleotide
  modified_base 70: mod_base = OTHER; note = 2'-O-methyl ribonucleotide
  modified_base 71: mod_base = OTHER; note = 2'-O-methyl ribonucleotide
  modified_base 72: mod_base = OTHER; note = 2'-O-methyl ribonucleotide
  modified_base 74: mod_base = OTHER; note = 2'-O-methyl ribonucleotide
  modified_base 75: mod_base = OTHER; note = 2'-O-methyl ribonucleotide
  modified_base 76: mod_base = OTHER; note = 2'-O-methyl ribonucleotide
  modified_base 77: mod_base = OTHER; note = 2'-O-methyl ribonucleotide
  modified_base 78: mod_base = OTHER; note = 2'-O-methyl ribonucleotide
  modified_base 79: mod_base = OTHER; note = 2'-O-methyl ribonucleotide
  modified_base 80: mod_base = OTHER; note = 2'-O-methyl ribonucleotide
  modified_base 82: mod_base = OTHER; note = 2'-O-methyl ribonucleotide
  modified_base 83: mod_base = OTHER; note = 2'-O-methyl ribonucleotide
  modified_base 84: mod_base = OTHER; note = 2'-O-methyl ribonucleotide
  modified_base 85: mod_base = OTHER; note = 2'-O-methyl ribonucleotide
  modified_base 86: mod_base = OTHER; note = 2'-O-methyl ribonucleotide
  modified_base 87: mod_base = OTHER; note = 2'-O-methyl ribonucleotide
  modified_base 89: mod_base = OTHER; note = 2'-O-methyl ribonucleotide
  modified_base 92: mod_base = OTHER; note = 2'-O-methyl ribonucleotide
  modified_base 93: mod_base = OTHER; note = 2'-O-methyl ribonucleotide
  modified_base 94: mod_base = OTHER; note = 2'-O-methyl ribonucleotide
  modified_base 95: mod_base = OTHER; note = 2'-O-methyl ribonucleotide
  modified_base 96: mod_base = OTHER; note = 2'-O-methyl ribonucleotide
  modified_base 97: mod_base = OTHER; note = 2'-O-methyl ribonucleotide
  modified_base 98: mod_base = OTHER; note = 2'-O-methyl ribonucleotide
  modified_base 99: mod_base = OTHER; note = 2'-O-methyl ribonucleotide
  modified_base 100: mod_base = OTHER; note = 2'-O-methyl ribonucleotide
  modified_base 1..3: mod_base = OTHER; note = phosphorothioate linkage
  modified_base 45..46: mod_base = OTHER; note = phosphorothioate linkage
  modified_base 98..100: mod_base = OTHER; note = phosphorothioate linkage

SEQ ID NO: 2739 - RNA, 103 nt, synthetic construct; identical to SEQ ID NO: 1700
  source 1..103: mol_type = other RNA
  modified_base 1: mod_base = OTHER; note = 2'-O-methyl ribonucleotide
  modified_base 2: mod_base = OTHER; note = 2'-O-methyl ribonucleotide
  modified_base 3: mod_base = OTHER; note = 2'-O-methyl ribonucleotide
  modified_base 21: mod_base = OTHER; note = 2'-O-methyl ribonucleotide
  modified_base 28: mod_base = OTHER; note = 2'-O-methyl ribonucleotide
  modified_base 29: mod_base = OTHER; note = 2'-O-methyl ribonucleotide
  modified_base 30: mod_base = OTHER; note = 2'-O-methyl ribonucleotide
  modified_base 31: mod_base = OTHER; note = 2'-O-methyl ribonucleotide
  modified_base 32: mod_base = OTHER; note = 2'-O-methyl ribonucleotide
  modified_base 33: mod_base = OTHER; note = 2'-O-methyl ribonucleotide
  modified_base 34: mod_base = OTHER; note = 2'-O-methyl ribonucleotide
  modified_base 35: mod_base = OTHER; note = 2'-O-methyl ribonucleotide
  modified_base 36: mod_base = OTHER; note = 2'-O-methyl ribonucleotide
  modified_base 37: mod_base = OTHER; note = 2'-O-methyl ribonucleotide
  modified_base 38: mod_base = OTHER; note = 2'-O-methyl ribonucleotide
  modified_base 39: mod_base = OTHER; note = 2'-O-methyl ribonucleotide
  modified_base 40: mod_base = OTHER; note = 2'-O-methyl ribonucleotide
  modified_base 41: mod_base = OTHER; note = 2'-O-methyl ribonucleotide
  modified_base 42: mod_base = OTHER; note = 2'-O-methyl ribonucleotide
  modified_base 46: mod_base = OTHER; note = 2'-O-methyl ribonucleotide
  modified_base 48: mod_base = OTHER; note = 2'-O-methyl ribonucleotide
  modified_base 50: mod_base = OTHER; note = 2'-O-methyl ribonucleotide
  modified_base 52: mod_base = OTHER; note = 2'-O-methyl ribonucleotide
  modified_base 53: mod_base = OTHER; note = 2'-O-methyl ribonucleotide
  modified_base 54: mod_base = OTHER; note = 2'-O-methyl ribonucleotide
  modified_base 57: mod_base = OTHER; note = 2'-O-methyl ribonucleotide
  modified_base 61: mod_base = OTHER; note = 2'-O-methyl ribonucleotide
  modified_base 66: mod_base = OTHER; note = 2'-O-methyl ribonucleotide
  modified_base 67: mod_base = OTHER; note = 2'-O-methyl ribonucleotide
  modified_base 70: mod_base = OTHER; note = 2'-O-methyl ribonucleotide
  modified_base 71: mod_base = OTHER; note = 2'-O-methyl ribonucleotide
  modified_base 72: mod_base = OTHER; note = 2'-O-methyl ribonucleotide
  modified_base 73: mod_base = OTHER; note = 2'-O-methyl ribonucleotide
  modified_base 74: mod_base = OTHER; note = 2'-O-methyl ribonucleotide
  modified_base 75: mod_base = OTHER; note = 2'-O-methyl ribonucleotide
  modified_base 76: mod_base = OTHER; note = 2'-O-methyl ribonucleotide
  modified_base 77: mod_base = OTHER; note = 2'-O-methyl ribonucleotide
  modified_base 78: mod_base = OTHER; note = 2'-O-methyl ribonucleotide
  modified_base 79: mod_base = OTHER; note = 2'-O-methyl ribonucleotide
  modified_base 80: mod_base = OTHER; note = 2'-O-methyl ribonucleotide
  modified_base 82: mod_base = OTHER; note = 2'-O-methyl ribonucleotide
  modified_base 83: mod_base = OTHER; note = 2'-O-methyl ribonucleotide
  modified_base 84: mod_base = OTHER; note = 2'-O-methyl ribonucleotide
  modified_base 85: mod_base = OTHER; note = 2'-O-methyl ribonucleotide
  modified_base 86: mod_base = OTHER; note = 2'-O-methyl ribonucleotide
  modified_base 87: mod_base = OTHER; note = 2'-O-methyl ribonucleotide
  modified_base 89: mod_base = OTHER; note = 2'-O-methyl ribonucleotide
  modified_base 91: mod_base = OTHER; note = 2'-O-methyl ribonucleotide
  modified_base 92: mod_base = OTHER; note = 2'-O-methyl ribonucleotide
  modified_base 93: mod_base = OTHER; note = 2'-O-methyl ribonucleotide
  modified_base 94: mod_base = OTHER; note = 2'-O-methyl ribonucleotide
  modified_base 95: mod_base = OTHER; note = 2'-O-methyl ribonucleotide
  modified_base 96: mod_base = OTHER; note = 2'-O-methyl ribonucleotide
  modified_base 97: mod_base = OTHER; note = 2'-O-methyl ribonucleotide
  modified_base 98: mod_base = OTHER; note = 2'-O-methyl ribonucleotide
  modified_base 99: mod_base = OTHER; note = 2'-O-methyl ribonucleotide
  modified_base 100: mod_base = OTHER; note = 2'-O-methyl ribonucleotide
  modified_base 1..3: mod_base = OTHER; note = phosphorothioate linkage
  modified_base 45..46: mod_base = OTHER; note = phosphorothioate linkage
  modified_base 98..100: mod_base = OTHER; note = phosphorothioate linkage

SEQ ID NO: 2740 - RNA, 103 nt, synthetic construct; identical to SEQ ID NO: 1700
  source 1..103: mol_type = other RNA
  modified_base 1: mod_base = OTHER; note = 2'-O-methyl ribonucleotide
  modified_base 2: mod_base = OTHER; note = 2'-O-methyl ribonucleotide
  modified_base 3: mod_base = OTHER; note = 2'-O-methyl ribonucleotide
  modified_base 21: mod_base = OTHER; note = 2'-O-methyl ribonucleotide
  modified_base 28: mod_base = OTHER; note = 2'-O-methyl ribonucleotide
  modified_base 29: mod_base = OTHER; note = 2'-O-methyl ribonucleotide
  modified_base 30: mod_base = OTHER; note = 2'-O-methyl ribonucleotide
  modified_base 31: mod_base = OTHER; note = 2'-O-methyl ribonucleotide
  modified_base 32: mod_base = OTHER; note = 2'-O-methyl ribonucleotide
  modified_base 34: mod_base = OTHER; note = 2'-O-methyl ribonucleotide
  modified_base 35: mod_base = OTHER; note = 2'-O-methyl ribonucleotide
  modified_base 36: mod_base = OTHER; note = 2'-O-methyl ribonucleotide
  modified_base 37: mod_base = OTHER; note = 2'-O-methyl ribonucleotide
  modified_base 38: mod_base = OTHER; note = 2'-O-methyl ribonucleotide
  modified_base 39: mod_base = OTHER; note = 2'-O-methyl ribonucleotide
  modified_base 40: mod_base = OTHER; note = 2'-O-methyl ribonucleotide
  modified_base 41: mod_base = OTHER; note = 2'-O-methyl ribonucleotide
  modified_base 42: mod_base = OTHER; note = 2'-O-methyl ribonucleotide
  modified_base 46: mod_base = OTHER; note = 2'-O-methyl ribonucleotide
  modified_base 48: mod_base = OTHER; note = 2'-O-methyl ribonucleotide
  modified_base 50: mod_base = OTHER; note = 2'-O-methyl ribonucleotide
  modified_base 52: mod_base = OTHER; note = 2'-O-methyl ribonucleotide
  modified_base 53: mod_base = OTHER; note = 2'-O-methyl ribonucleotide
  modified_base 54: mod_base = OTHER; note = 2'-O-methyl ribonucleotide
  modified_base 57: mod_base = OTHER; note = 2'-O-methyl ribonucleotide
  modified_base 61: mod_base = OTHER; note = 2'-O-methyl ribonucleotide
  modified_base 66: mod_base = OTHER; note = 2'-O-methyl ribonucleotide
  modified_base 67: mod_base = OTHER; note = 2'-O-methyl ribonucleotide
  modified_base 70: mod_base = OTHER; note = 2'-O-methyl ribonucleotide
  modified_base 71: mod_base = OTHER; note = 2'-O-methyl ribonucleotide
  modified_base 72: mod_base = OTHER; note = 2'-O-methyl ribonucleotide
  modified_base 73: mod_base = OTHER; note = 2'-O-methyl ribonucleotide
  modified_base 74: mod_base = OTHER; note = 2'-O-methyl ribonucleotide
  modified_base 75: mod_base = OTHER; note = 2'-O-methyl ribonucleotide
  modified_base 76: mod_base = OTHER; note = 2'-O-methyl ribonucleotide
  modified_base 77: mod_base = OTHER; note = 2'-O-methyl ribonucleotide
  modified_base 78: mod_base = OTHER; note = 2'-O-methyl ribonucleotide
  modified_base 79: mod_base = OTHER; note = 2'-O-methyl ribonucleotide
  modified_base 80: mod_base = OTHER; note = 2'-O-methyl ribonucleotide
  modified_base 82: mod_base = OTHER; note = 2'-O-methyl ribonucleotide
  modified_base 83: mod_base = OTHER; note = 2'-O-methyl ribonucleotide
  modified_base 84: mod_base = OTHER; note = 2'-O-methyl ribonucleotide
  modified_base 85: mod_base = OTHER; note = 2'-O-methyl ribonucleotide
  modified_base 86: mod_base = OTHER; note = 2'-O-methyl ribonucleotide
  modified_base 87: mod_base = OTHER; note = 2'-O-methyl ribonucleotide
  modified_base 89: mod_base = OTHER; note = 2'-O-methyl ribonucleotide
  modified_base 92: mod_base = OTHER; note = 2'-O-methyl ribonucleotide
  modified_base 93: mod_base = OTHER; note = 2'-O-methyl ribonucleotide
  modified_base 94: mod_base = OTHER; note = 2'-O-methyl ribonucleotide
  modified_base 95: mod_base = OTHER; note = 2'-O-methyl ribonucleotide
  modified_base 96: mod_base = OTHER; note = 2'-O-methyl ribonucleotide
  modified_base 97: mod_base = OTHER; note = 2'-O-methyl ribonucleotide
  modified_base 98: mod_base = OTHER; note = 2'-O-methyl ribonucleotide
  modified_base 99: mod_base = OTHER; note = 2'-O-methyl ribonucleotide
  modified_base 100: mod_base = OTHER; note = 2'-O-methyl ribonucleotide
  modified_base 1..3: mod_base = OTHER; note = phosphorothioate linkage
  modified_base 45..46: mod_base = OTHER; note = phosphorothioate linkage
  modified_base 98..100: mod_base = OTHER; note = phosphorothioate linkage

SEQ ID NO: 2741 - RNA, 103 nt, synthetic construct; identical to SEQ ID NO: 1700
  source 1..103: mol_type = other RNA
  modified_base 1: mod_base = OTHER; note = 2'-O-methyl ribonucleotide
  modified_base 2: mod_base = OTHER; note = 2'-O-methyl ribonucleotide
  modified_base 3: mod_base = OTHER; note = 2'-O-methyl ribonucleotide
  modified_base 21: mod_base = OTHER; note = 2'-O-methyl ribonucleotide
  modified_base 28: mod_base = OTHER; note = 2'-O-methyl ribonucleotide
  modified_base 29: mod_base = OTHER; note = 2'-O-methyl ribonucleotide
  modified_base 30: mod_base = OTHER; note = 2'-O-methyl ribonucleotide
  modified_base 31: mod_base = OTHER; note = 2'-O-methyl ribonucleotide
  modified_base 32: mod_base = OTHER; note = 2'-O-methyl ribonucleotide
  modified_base 34: mod_base = OTHER; note = 2'-O-methyl ribonucleotide
  modified_base 35: mod_base = OTHER; note = 2'-O-methyl ribonucleotide
  modified_base 36: mod_base = OTHER; note = 2'-O-methyl ribonucleotide
  modified_base 37: mod_base = OTHER; note = 2'-O-methyl ribonucleotide
  modified_base 38: mod_base = OTHER; note = 2'-O-methyl ribonucleotide
  modified_base 39: mod_base = OTHER; note = 2'-O-methyl ribonucleotide
  modified_base 40: mod_base = OTHER; note = 2'-O-methyl ribonucleotide
  modified_base 41: mod_base = OTHER; note = 2'-O-methyl ribonucleotide
  modified_base 42: mod_base = OTHER; note = 2'-O-methyl ribonucleotide
  modified_base 46: mod_base = OTHER; note = 2'-O-methyl ribonucleotide
  modified_base 48: mod_base = OTHER; note = 2'-O-methyl ribonucleotide
  modified_base 50: mod_base = OTHER; note = 2'-O-methyl ribonucleotide
  modified_base 52: mod_base = OTHER; note = 2'-O-methyl ribonucleotide
  modified_base 53: mod_base = OTHER; note = 2'-O-methyl ribonucleotide
  modified_base 54: mod_base = OTHER; note = 2'-O-methyl ribonucleotide
  modified_base 57: mod_base = OTHER; note = 2'-O-methyl ribonucleotide
  modified_base 61: mod_base = OTHER; note = 2'-O-methyl ribonucleotide
  modified_base 66: mod_base = OTHER; note = 2'-O-methyl ribonucleotide
  modified_base 67: mod_base = OTHER; note = 2'-O-methyl ribonucleotide
  modified_base 70: mod_base = OTHER; note = 2'-O-methyl ribonucleotide
  modified_base 71: mod_base = OTHER; note = 2'-O-methyl ribonucleotide
  modified_base 72: mod_base = OTHER; note = 2'-O-methyl ribonucleotide
  modified_base 73: mod_base = OTHER; note = 2'-O-methyl ribonucleotide
  modified_base 74: mod_base = OTHER; note = 2'-O-methyl ribonucleotide
  modified_base 75: mod_base = OTHER; note = 2'-O-methyl ribonucleotide
  modified_base 76: mod_base = OTHER; note = 2'-O-methyl ribonucleotide
  modified_base 77: mod_base = OTHER; note = 2'-O-methyl ribonucleotide
  modified_base 78: mod_base = OTHER; note = 2'-O-methyl ribonucleotide
  modified_base 79: mod_base = OTHER; note = 2'-O-methyl ribonucleotide
  modified_base 80: mod_base = OTHER; note = 2'-O-methyl ribonucleotide
  modified_base 82: mod_base = OTHER; note = 2'-O-methyl ribonucleotide
  modified_base 83: mod_base = OTHER; note = 2'-O-methyl ribonucleotide
  modified_base 84: mod_base = OTHER; note = 2'-O-methyl ribonucleotide
  modified_base 85: mod_base = OTHER; note = 2'-O-methyl ribonucleotide
  modified_base 86: mod_base = OTHER; note = 2'-O-methyl ribonucleotide
  modified_base 87: mod_base = OTHER; note = 2'-O-methyl ribonucleotide
  modified_base 89: mod_base = OTHER; note = 2'-O-methyl ribonucleotide
  modified_base 91: mod_base = OTHER; note = 2'-O-methyl ribonucleotide
  modified_base 92: mod_base = OTHER; note = 2'-O-methyl ribonucleotide
  modified_base 93: mod_base = OTHER; note = 2'-O-methyl ribonucleotide
  modified_base 94: mod_base = OTHER; note = 2'-O-methyl ribonucleotide
  modified_base 95: mod_base = OTHER; note = 2'-O-methyl ribonucleotide
  modified_base 96: mod_base = OTHER; note = 2'-O-methyl ribonucleotide
  modified_base 97: mod_base = OTHER; note = 2'-O-methyl ribonucleotide
  modified_base 98: mod_base = OTHER; note = 2'-O-methyl ribonucleotide
  modified_base 99: mod_base = OTHER; note = 2'-O-methyl ribonucleotide
  modified_base 100: mod_base = OTHER; note = 2'-O-methyl ribonucleotide
  modified_base 1..3: mod_base = OTHER; note = phosphorothioate linkage
  modified_base 45..46: mod_base = OTHER; note = phosphorothioate linkage
  modified_base 98..100: mod_base = OTHER; note = phosphorothioate linkage

SEQ ID NO: 2742 - RNA, 103 nt, synthetic construct; identical to SEQ ID NO: 1700
  source 1..103: mol_type = other RNA
  modified_base 1: mod_base = OTHER; note = 2'-O-methyl ribonucleotide
  modified_base 2: mod_base = OTHER; note = 2'-O-methyl ribonucleotide
  modified_base 3: mod_base = OTHER; note = 2'-O-methyl ribonucleotide
  modified_base 21: mod_base = OTHER; note = 2'-O-methyl ribonucleotide
  modified_base 28: mod_base = OTHER; note = 2'-O-methyl ribonucleotide
  modified_base 29: mod_base = OTHER; note = 2'-O-methyl ribonucleotide
  modified_base 30: mod_base = OTHER; note = 2'-O-methyl ribonucleotide
  modified_base 31: mod_base = OTHER; note = 2'-O-methyl ribonucleotide
  modified_base 32: mod_base = OTHER; note = 2'-O-methyl ribonucleotide
  modified_base 34: mod_base = OTHER; note = 2'-O-methyl ribonucleotide
  modified_base 35: mod_base = OTHER; note = 2'-O-methyl ribonucleotide
  modified_base 36: mod_base = OTHER; note = 2'-O-methyl ribonucleotide
  modified_base 37: mod_base = OTHER; note = 2'-O-methyl ribonucleotide
  modified_base 38: mod_base = OTHER; note = 2'-O-methyl ribonucleotide
  modified_base 39: mod_base = OTHER; note = 2'-O-methyl ribonucleotide
  modified_base 40: mod_base = OTHER; note = 2'-O-methyl ribonucleotide
  modified_base 41: mod_base = OTHER; note = 2'-O-methyl ribonucleotide
  modified_base 42: mod_base = OTHER; note = 2'-O-methyl ribonucleotide
  modified_base 46: mod_base = OTHER; note = 2'-O-methyl ribonucleotide
  modified_base 48: mod_base = OTHER; note = 2'-O-methyl ribonucleotide
  modified_base 50: mod_base = OTHER; note = 2'-O-methyl ribonucleotide
  modified_base 52: mod_base = OTHER; note = 2'-O-methyl ribonucleotide
  modified_base 53: mod_base = OTHER; note = 2'-O-methyl ribonucleotide
  modified_base 54: mod_base = OTHER; note = 2'-O-methyl ribonucleotide
  modified_base 55: mod_base = OTHER; note = 2'-O-methyl ribonucleotide
  modified_base 56: mod_base = OTHER; note = 2'-O-methyl ribonucleotide
  modified_base 57: mod_base = OTHER; note = 2'-O-methyl ribonucleotide
  modified_base 60: mod_base = OTHER; note = 2'-O-methyl ribonucleotide
  modified_base 61: mod_base = OTHER; note = 2'-O-methyl ribonucleotide
  modified_base 66: mod_base = OTHER; note = 2'-O-methyl ribonucleotide
  modified_base 67: mod_base = OTHER; note = 2'-O-methyl ribonucleotide
  modified_base 70: mod_base = OTHER; note = 2'-O-methyl ribonucleotide
  modified_base 71: mod_base = OTHER; note = 2'-O-methyl ribonucleotide
  modified_base 72: mod_base = OTHER; note = 2'-O-methyl ribonucleotide
  modified_base 74: mod_base = OTHER; note = 2'-O-methyl ribonucleotide
  modified_base 75: mod_base = OTHER; note = 2'-O-methyl ribonucleotide
  modified_base 76: mod_base = OTHER; note = 2'-O-methyl ribonucleotide
  modified_base 77: mod_base = OTHER; note = 2'-O-methyl ribonucleotide
  modified_base 78: mod_base = OTHER; note = 2'-O-methyl ribonucleotide
  modified_base 79: mod_base = OTHER; note = 2'-O-methyl ribonucleotide
  modified_base 80: mod_base = OTHER; note = 2'-O-methyl ribonucleotide
  modified_base 82: mod_base = OTHER; note = 2'-O-methyl ribonucleotide
  modified_base 83: mod_base = OTHER; note = 2'-O-methyl ribonucleotide
  modified_base 84: mod_base = OTHER; note = 2'-O-methyl ribonucleotide
  modified_base 85: mod_base = OTHER; note = 2'-O-methyl ribonucleotide
  modified_base 86: mod_base = OTHER; note = 2'-O-methyl ribonucleotide
  modified_base 87: mod_base = OTHER; note = 2'-O-methyl ribonucleotide
  modified_base 89: mod_base = OTHER; note = 2'-O-methyl ribonucleotide
  modified_base 92: mod_base = OTHER; note = 2'-O-methyl ribonucleotide
  modified_base 93: mod_base = OTHER; note = 2'-O-methyl ribonucleotide
  modified_base 94: mod_base = OTHER; note = 2'-O-methyl ribonucleotide
  modified_base 95: mod_base = OTHER; note = 2'-O-methyl ribonucleotide
  modified_base 96: mod_base = OTHER; note = 2'-O-methyl ribonucleotide
  modified_base 97: mod_base = OTHER; note = 2'-O-methyl ribonucleotide
  modified_base 98: mod_base = OTHER; note = 2'-O-methyl ribonucleotide
  modified_base 99: mod_base = OTHER; note = 2'-O-methyl ribonucleotide
  modified_base 100: mod_base = OTHER; note = 2'-O-methyl ribonucleotide
  modified_base 1..3: mod_base = OTHER; note = phosphorothioate linkage
  modified_base 45..46: mod_base = OTHER; note = phosphorothioate linkage
  modified_base 98..100: mod_base = OTHER; note = phosphorothioate linkage

SEQ ID NO: 2743 - RNA, 103 nt, synthetic construct; identical to SEQ ID NO: 1643
  source 1..103: mol_type = other RNA
  modified_base 1: mod_base = OTHER; note = 2'-O-methyl ribonucleotide
  modified_base 2: mod_base = OTHER; note = 2'-O-methyl ribonucleotide
  modified_base 3: mod_base = OTHER; note = 2'-O-methyl ribonucleotide
  modified_base 21: mod_base = OTHER; note = 2'-O-methyl ribonucleotide
  modified_base 28: mod_base = OTHER; note = 2'-O-methyl ribonucleotide
  modified_base 29: mod_base = OTHER; note = 2'-O-methyl ribonucleotide
  modified_base 30: mod_base = OTHER; note = 2'-O-methyl ribonucleotide
  modified_base 31: mod_base = OTHER; note = 2'-O-methyl ribonucleotide
  modified_base 32: mod_base = OTHER; note = 2'-O-methyl ribonucleotide
  modified_base 33: mod_base = OTHER; note = 2'-O-methyl ribonucleotide
  modified_base 34: mod_base = OTHER; note = 2'-O-methyl ribonucleotide
  modified_base 35: mod_base = OTHER; note = 2'-O-methyl ribonucleotide
  modified_base 36: mod_base = OTHER; note = 2'-O-methyl ribonucleotide
  modified_base 37: mod_base = OTHER; note = 2'-O-methyl ribonucleotide
  modified_base 38: mod_base = OTHER; note = 2'-O-methyl ribonucleotide
  modified_base 39: mod_base = OTHER; note = 2'-O-methyl ribonucleotide
  modified_base 40: mod_base = OTHER; note = 2'-O-methyl ribonucleotide
  modified_base 41: mod_base = OTHER; note = 2'-O-methyl ribonucleotide
  modified_base 42: mod_base = OTHER; note = 2'-O-methyl ribonucleotide
  modified_base 46: mod_base = OTHER; note = 2'-O-methyl ribonucleotide
  modified_base 48: mod_base = OTHER; note = 2'-O-methyl ribonucleotide
  modified_base 50: mod_base = OTHER; note = 2'-O-methyl ribonucleotide
  modified_base 52: mod_base = OTHER; note = 2'-O-methyl ribonucleotide
  modified_base 53: mod_base = OTHER; note = 2'-O-methyl ribonucleotide
  modified_base 54: mod_base = OTHER; note = 2'-O-methyl ribonucleotide
  modified_base 55: mod_base = OTHER; note = 2'-O-methyl ribonucleotide
  modified_base 56: mod_base = OTHER; note = 2'-O-methyl ribonucleotide
  modified_base 57: mod_base = OTHER; note = 2'-O-methyl ribonucleotide
  modified_base 60: mod_base = OTHER; note = 2'-O-methyl ribonucleotide
  modified_base 61: mod_base = OTHER; note = 2'-O-methyl ribonucleotide
  modified_base 66: mod_base = OTHER; note = 2'-O-methyl ribonucleotide
  modified_base 67: mod_base = OTHER; note = 2'-O-methyl ribonucleotide
  modified_base 70: mod_base = OTHER; note = 2'-O-methyl ribonucleotide
  modified_base 71: mod_base = OTHER; note = 2'-O-methyl ribonucleotide
  modified_base 72: mod_base = OTHER; note = 2'-O-methyl ribonucleotide
  modified_base 73: mod_base = OTHER; note = 2'-O-methyl ribonucleotide
  modified_base 74: mod_base = OTHER; note = 2'-O-methyl ribonucleotide
  modified_base 75: mod_base = OTHER; note = 2'-O-methyl ribonucleotide
  modified_base 76: mod_base = OTHER; note = 2'-O-methyl ribonucleotide
  modified_base 77: mod_base = OTHER; note = 2'-O-methyl ribonucleotide
  modified_base 78: mod_base = OTHER; note = 2'-O-methyl ribonucleotide
  modified_base 79: mod_base = OTHER; note = 2'-O-methyl ribonucleotide
  modified_base 80: mod_base = OTHER; note = 2'-O-methyl ribonucleotide
  modified_base 81: mod_base = OTHER; note = 2'-O-methyl ribonucleotide
  modified_base 83: mod_base = OTHER; note = 2'-O-methyl ribonucleotide
  modified_base 84: mod_base = OTHER; note = 2'-O-methyl ribonucleotide
  modified_base 85: mod_base = OTHER; note = 2'-O-methyl ribonucleotide
  modified_base 86: mod_base = OTHER; note = 2'-O-methyl ribonucleotide
  modified_base 87: mod_base = OTHER; note = 2'-O-methyl ribonucleotide
  modified_base 88: mod_base = OTHER; note = 2'-O-methyl ribonucleotide
  modified_base 89: mod_base = OTHER; note = 2'-O-methyl ribonucleotide
  modified_base 90: mod_base = OTHER; note = 2'-O-methyl ribonucleotide
  modified_base 91: mod_base = OTHER; note = 2'-O-methyl ribonucleotide
  modified_base 92: mod_base = OTHER; note = 2'-O-methyl ribonucleotide
  modified_base 93: mod_base = OTHER; note = 2'-O-methyl ribonucleotide
  modified_base 94: mod_base = OTHER; note = 2'-O-methyl ribonucleotide
  modified_base 95: mod_base = OTHER; note = 2'-O-methyl ribonucleotide
  modified_base 96: mod_base = OTHER; note = 2'-O-methyl ribonucleotide
  modified_base 97: mod_base = OTHER; note = 2'-O-methyl ribonucleotide
  modified_base 98: mod_base = OTHER; note = 2'-O-methyl ribonucleotide
  modified_base 99: mod_base = OTHER; note = 2'-O-methyl ribonucleotide
  modified_base 100: mod_base = OTHER; note = 2'-O-methyl ribonucleotide
  modified_base 1..3: mod_base = OTHER; note = phosphorothioate linkage
  modified_base 25..26: mod_base = OTHER; note = phosphorothioate linkage
  modified_base 98..100: mod_base = OTHER; note = phosphorothioate linkage

SEQ ID NO: 2744 - RNA, 103 nt, synthetic construct; identical to SEQ ID NO: 1643
  source 1..103: mol_type = other RNA
  modified_base 1: mod_base = OTHER; note = 2'-O-methyl ribonucleotide
  modified_base 2: mod_base = OTHER; note = 2'-O-methyl ribonucleotide
  modified_base 3: mod_base = OTHER; note = 2'-O-methyl ribonucleotide
  modified_base 21: mod_base = OTHER; note = 2'-O-methyl ribonucleotide
  modified_base 28: mod_base = OTHER; note = 2'-O-methyl ribonucleotide
  modified_base 29: mod_base = OTHER; note = 2'-O-methyl ribonucleotide
  modified_base 30: mod_base = OTHER; note = 2'-O-methyl ribonucleotide
  modified_base 31: mod_base = OTHER; note = 2'-O-methyl ribonucleotide
  modified_base 32: mod_base = OTHER; note = 2'-O-methyl ribonucleotide
  modified_base 34: mod_base = OTHER; note = 2'-O-methyl ribonucleotide
  modified_base 35: mod_base = OTHER; note = 2'-O-methyl ribonucleotide
  modified_base 36: mod_base = OTHER; note = 2'-O-methyl ribonucleotide
  modified_base 37: mod_base = OTHER; note = 2'-O-methyl ribonucleotide
  modified_base 38: mod_base = OTHER; note = 2'-O-methyl ribonucleotide
  modified_base 39: mod_base = OTHER; note = 2'-O-methyl ribonucleotide
  modified_base 40: mod_base = OTHER; note = 2'-O-methyl ribonucleotide
  modified_base 41: mod_base = OTHER; note = 2'-O-methyl ribonucleotide
  modified_base 42: mod_base = OTHER; note = 2'-O-methyl ribonucleotide
  modified_base 46: mod_base = OTHER; note = 2'-O-methyl ribonucleotide
  modified_base 48: mod_base = OTHER; note = 2'-O-methyl ribonucleotide
  modified_base 50: mod_base = OTHER; note = 2'-O-methyl ribonucleotide
  modified_base 52: mod_base = OTHER; note = 2'-O-methyl ribonucleotide
  modified_base 53: mod_base = OTHER; note = 2'-O-methyl ribonucleotide
  modified_base 54: mod_base = OTHER; note = 2'-O-methyl ribonucleotide
  modified_base 55: mod_base = OTHER; note = 2'-O-methyl ribonucleotide
  modified_base 56: mod_base = OTHER; note = 2'-O-methyl ribonucleotide
  modified_base 57: mod_base = OTHER; note = 2'-O-methyl ribonucleotide
  modified_base 60: mod_base = OTHER; note = 2'-O-methyl ribonucleotide
  modified_base 61: mod_base = OTHER; note = 2'-O-methyl ribonucleotide
  modified_base 66: mod_base = OTHER; note = 2'-O-methyl ribonucleotide
  modified_base 67: mod_base = OTHER; note = 2'-O-methyl ribonucleotide
  modified_base 70: mod_base = OTHER; note = 2'-O-methyl ribonucleotide
  modified_base 71: mod_base = OTHER; note = 2'-O-methyl ribonucleotide
  modified_base 72: mod_base = OTHER; note = 2'-O-methyl ribonucleotide
  modified_base 74: mod_base = OTHER; note = 2'-O-methyl ribonucleotide
  modified_base 75: mod_base = OTHER; note = 2'-O-methyl ribonucleotide
  modified_base 76: mod_base = OTHER; note = 2'-O-methyl ribonucleotide
  modified_base 77: mod_base = OTHER; note = 2'-O-methyl ribonucleotide
  modified_base 78: mod_base = OTHER; note = 2'-O-methyl ribonucleotide
  modified_base 79: mod_base = OTHER; note = 2'-O-methyl ribonucleotide
  modified_base 80: mod_base = OTHER; note = 2'-O-methyl ribonucleotide
  modified_base 81: mod_base = OTHER; note = 2'-O-methyl ribonucleotide
  modified_base 83: mod_base = OTHER; note = 2'-O-methyl ribonucleotide
  modified_base 84: mod_base = OTHER; note = 2'-O-methyl ribonucleotide
  modified_base 85: mod_base = OTHER; note = 2'-O-methyl ribonucleotide
  modified_base 86: mod_base = OTHER; note = 2'-O-methyl ribonucleotide
  modified_base 87: mod_base = OTHER; note = 2'-O-methyl ribonucleotide
  modified_base 88: mod_base = OTHER; note = 2'-O-methyl ribonucleotide
  modified_base 89: mod_base = OTHER; note = 2'-O-methyl ribonucleotide
  modified_base 90: mod_base = OTHER; note = 2'-O-methyl ribonucleotide
  modified_base 91: mod_base = OTHER; note = 2'-O-methyl ribonucleotide
  modified_base 92: mod_base = OTHER; note = 2'-O-methyl ribonucleotide
  modified_base 93: mod_base = OTHER; note = 2'-O-methyl ribonucleotide
  modified_base 94: mod_base = OTHER; note = 2'-O-methyl ribonucleotide
  modified_base 95: mod_base = OTHER; note = 2'-O-methyl ribonucleotide
  modified_base 96: mod_base = OTHER; note = 2'-O-methyl ribonucleotide
  modified_base 97: mod_base = OTHER; note = 2'-O-methyl ribonucleotide
  modified_base 98: mod_base = OTHER; note = 2'-O-methyl ribonucleotide
  modified_base 99: mod_base = OTHER; note = 2'-O-methyl ribonucleotide
  modified_base 100: mod_base = OTHER; note = 2'-O-methyl ribonucleotide
  modified_base 1..3: mod_base = OTHER; note = phosphorothioate linkage
  modified_base 25..26: mod_base = OTHER; note = phosphorothioate linkage
  modified_base 98..100: mod_base = OTHER; note = phosphorothioate linkage

SEQ ID NO: 2745 - RNA, 103 nt, synthetic construct; identical to SEQ ID NO: 1699
  source 1..103: mol_type = other RNA
  modified_base 1: mod_base = OTHER; note = 2'-O-methyl ribonucleotide
  modified_base 2: mod_base = OTHER; note = 2'-O-methyl ribonucleotide
  modified_base 3: mod_base = OTHER; note = 2'-O-methyl ribonucleotide
  modified_base 21: mod_base = OTHER; note = 2'-O-methyl ribonucleotide
  modified_base 28: mod_base = OTHER; note = 2'-O-methyl ribonucleotide
  modified_base 29: mod_base = OTHER; note = 2'-O-methyl ribonucleotide
  modified_base 30: mod_base = OTHER; note = 2'-O-methyl ribonucleotide
  modified_base 31: mod_base = OTHER; note = 2'-O-methyl ribonucleotide
  modified_base 32: mod_base = OTHER; note = 2'-O-methyl ribonucleotide
  modified_base 33: mod_base = OTHER; note = 2'-O-methyl ribonucleotide
  modified_base 34: mod_base = OTHER; note = 2'-O-methyl ribonucleotide
  modified_base 35: mod_base = OTHER; note = 2'-O-methyl ribonucleotide
  modified_base 36: mod_base = OTHER; note = 2'-O-methyl ribonucleotide
  modified_base 37: mod_base = OTHER; note = 2'-O-methyl ribonucleotide
  modified_base 38: mod_base = OTHER; note = 2'-O-methyl ribonucleotide
  modified_base 39: mod_base = OTHER; note = 2'-O-methyl ribonucleotide
  modified_base 40: mod_base = OTHER; note = 2'-O-methyl ribonucleotide
  modified_base 41: mod_base = OTHER; note = 2'-O-methyl ribonucleotide
  modified_base 42: mod_base = OTHER; note = 2'-O-methyl ribonucleotide
  modified_base 46: mod_base = OTHER; note = 2'-O-methyl ribonucleotide
  modified_base 48: mod_base = OTHER; note = 2'-O-methyl ribonucleotide
  modified_base 50: mod_base = OTHER; note = 2'-O-methyl ribonucleotide
  modified_base 52: mod_base = OTHER; note = 2'-O-methyl ribonucleotide
  modified_base 53: mod_base = OTHER; note = 2'-O-methyl ribonucleotide
  modified_base 54: mod_base = OTHER; note = 2'-O-methyl ribonucleotide
  modified_base 55: mod_base = OTHER; note = 2'-O-methyl ribonucleotide
  modified_base 56: mod_base = OTHER; note = 2'-O-methyl ribonucleotide
  modified_base 57: mod_base = OTHER; note = 2'-O-methyl ribonucleotide
  modified_base 60: mod_base = OTHER; note = 2'-O-methyl ribonucleotide
  modified_base 61: mod_base = OTHER; note = 2'-O-methyl ribonucleotide
  modified_base 66: mod_base = OTHER; note = 2'-O-methyl ribonucleotide
  modified_base 67: mod_base = OTHER; note = 2'-O-methyl ribonucleotide
  modified_base 70: mod_base = OTHER; note = 2'-O-methyl ribonucleotide
  modified_base 71: mod_base = OTHER; note = 2'-O-methyl ribonucleotide
  modified_base 72: mod_base = OTHER; note = 2'-O-methyl ribonucleotide
  modified_base 73: mod_base = OTHER; note = 2'-O-methyl ribonucleotide
  modified_base 74: mod_base = OTHER; note = 2'-O-methyl ribonucleotide
  modified_base 75: mod_base = OTHER; note = 2'-O-methyl ribonucleotide
  modified_base 76: mod_base = OTHER; note = 2'-O-methyl ribonucleotide
  modified_base 77: mod_base = OTHER; note = 2'-O-methyl ribonucleotide
  modified_base 78: mod_base = OTHER; note = 2'-O-methyl ribonucleotide
  modified_base 79: mod_base = OTHER; note = 2'-O-methyl ribonucleotide
  modified_base 80: mod_base = OTHER; note = 2'-O-methyl ribonucleotide
  modified_base 81: mod_base = OTHER; note = 2'-O-methyl ribonucleotide
  modified_base 83: mod_base = OTHER; note = 2'-O-methyl ribonucleotide
  modified_base 84: mod_base = OTHER; note = 2'-O-methyl ribonucleotide
  modified_base 85: mod_base = OTHER; note = 2'-O-methyl ribonucleotide
  modified_base 86: mod_base = OTHER; note = 2'-O-methyl ribonucleotide
  modified_base 87: mod_base = OTHER; note = 2'-O-methyl ribonucleotide
  modified_base 88: mod_base = OTHER; note = 2'-O-methyl ribonucleotide
  modified_base 89: mod_base = OTHER; note = 2'-O-methyl ribonucleotide
  modified_base 90: mod_base = OTHER; note = 2'-O-methyl ribonucleotide
  modified_base 91: mod_base = OTHER; note = 2'-O-methyl ribonucleotide
  modified_base 92: mod_base = OTHER; note = 2'-O-methyl ribonucleotide
  modified_base 93: mod_base = OTHER; note = 2'-O-methyl ribonucleotide
  modified_base 94: mod_base = OTHER; note = 2'-O-methyl ribonucleotide
  modified_base 95: mod_base = OTHER; note = 2'-O-methyl ribonucleotide
  modified_base 96: mod_base = OTHER; note = 2'-O-methyl ribonucleotide
  modified_base 97: mod_base = OTHER; note = 2'-O-methyl ribonucleotide
  modified_base 98: mod_base = OTHER; note = 2'-O-methyl ribonucleotide
  modified_base 99: mod_base = OTHER; note = 2'-O-methyl ribonucleotide
  modified_base 100: mod_base = OTHER; note = 2'-O-methyl ribonucleotide
  modified_base 1..3: mod_base = OTHER; note = phosphorothioate linkage
  modified_base 25..26: mod_base = OTHER; note = phosphorothioate linkage
  modified_base 98..100: mod_base = OTHER; note = phosphorothioate linkage

SEQ ID NO: 2746 - RNA, 103 nt, synthetic construct; identical to SEQ ID NO: 1699
  source 1..103: mol_type = other RNA
  modified_base 1: mod_base = OTHER; note = 2'-O-methyl ribonucleotide
  modified_base 2: mod_base = OTHER; note = 2'-O-methyl ribonucleotide
  modified_base 3: mod_base = OTHER; note = 2'-O-methyl ribonucleotide
  modified_base 21: mod_base = OTHER; note = 2'-O-methyl ribonucleotide
  modified_base 28: mod_base = OTHER; note = 2'-O-methyl ribonucleotide
  modified_base 29: mod_base = OTHER; note = 2'-O-methyl ribonucleotide
  modified_base 30: mod_base = OTHER; note = 2'-O-methyl ribonucleotide
  modified_base 31: mod_base = OTHER; note = 2'-O-methyl ribonucleotide
  modified_base 32: mod_base = OTHER; note = 2'-O-methyl ribonucleotide
  modified_base 34: mod_base = OTHER; note = 2'-O-methyl ribonucleotide
  modified_base 35: mod_base = OTHER; note = 2'-O-methyl ribonucleotide
  modified_base 36: mod_base = OTHER; note = 2'-O-methyl ribonucleotide
  modified_base 37: mod_base = OTHER; note = 2'-O-methyl ribonucleotide
  modified_base 38: mod_base = OTHER; note = 2'-O-methyl ribonucleotide
  modified_base 39: mod_base = OTHER; note = 2'-O-methyl ribonucleotide
  modified_base 40: mod_base = OTHER; note = 2'-O-methyl ribonucleotide
  modified_base 41: mod_base = OTHER; note = 2'-O-methyl ribonucleotide
  modified_base 42: mod_base = OTHER; note = 2'-O-methyl ribonucleotide
  modified_base 46: mod_base = OTHER; note = 2'-O-methyl ribonucleotide
  modified_base 48: mod_base = OTHER; note = 2'-O-methyl ribonucleotide
  modified_base 50: mod_base = OTHER; note = 2'-O-methyl ribonucleotide
  modified_base 52: mod_base = OTHER; note = 2'-O-methyl ribonucleotide
  modified_base 53: mod_base = OTHER; note = 2'-O-methyl ribonucleotide
  modified_base 54: mod_base = OTHER; note = 2'-O-methyl ribonucleotide
  modified_base 55: mod_base = OTHER; note = 2'-O-methyl ribonucleotide
  modified_base 56: mod_base = OTHER; note = 2'-O-methyl ribonucleotide
  modified_base 57: mod_base = OTHER; note = 2'-O-methyl ribonucleotide
  modified_base 60: mod_base = OTHER; note = 2'-O-methyl ribonucleotide
  modified_base 61: mod_base = OTHER; note = 2'-O-methyl ribonucleotide
  modified_base 66: mod_base = OTHER; note = 2'-O-methyl ribonucleotide
  modified_base 67: mod_base = OTHER; note = 2'-O-methyl ribonucleotide
  modified_base 70: mod_base = OTHER; note = 2'-O-methyl ribonucleotide
  modified_base 71: mod_base = OTHER; note = 2'-O-methyl ribonucleotide
  modified_base 72: mod_base = OTHER; note = 2'-O-methyl ribonucleotide
  modified_base 74: mod_base = OTHER; note = 2'-O-methyl ribonucleotide
  modified_base 75: mod_base = OTHER; note = 2'-O-methyl ribonucleotide
  modified_base 76: mod_base = OTHER; note = 2'-O-methyl ribonucleotide
  modified_base 77: mod_base = OTHER; note = 2'-O-methyl ribonucleotide
  modified_base 78: mod_base = OTHER; note = 2'-O-methyl ribonucleotide
  modified_base 79: mod_base = OTHER; note = 2'-O-methyl ribonucleotide
  modified_base 80: mod_base = OTHER; note = 2'-O-methyl ribonucleotide
  modified_base 81: mod_base = OTHER; note = 2'-O-methyl ribonucleotide
  modified_base 83: mod_base = OTHER; note = 2'-O-methyl ribonucleotide
  modified_base 84: mod_base = OTHER; note = 2'-O-methyl ribonucleotide
  modified_base 85: mod_base = OTHER; note = 2'-O-methyl ribonucleotide
  modified_base 86: mod_base = OTHER; note = 2'-O-methyl ribonucleotide
  modified_base 87: mod_base = OTHER; note = 2'-O-methyl ribonucleotide
  modified_base 88: mod_base = OTHER; note = 2'-O-methyl ribonucleotide
  modified_base 89: mod_base = OTHER; note = 2'-O-methyl ribonucleotide
  modified_base 90: mod_base = OTHER; note = 2'-O-methyl ribonucleotide
  modified_base 91: mod_base = OTHER; note = 2'-O-methyl ribonucleotide
  modified_base 92: mod_base = OTHER; note = 2'-O-methyl ribonucleotide
  modified_base 93: mod_base = OTHER; note = 2'-O-methyl ribonucleotide
  modified_base 94: mod_base = OTHER; note = 2'-O-methyl ribonucleotide
  modified_base 95: mod_base = OTHER; note = 2'-O-methyl ribonucleotide
  modified_base 96: mod_base = OTHER; note = 2'-O-methyl ribonucleotide
  modified_base 97: mod_base = OTHER; note = 2'-O-methyl ribonucleotide
  modified_base 98: mod_base = OTHER; note = 2'-O-methyl ribonucleotide
  modified_base 99: mod_base = OTHER; note = 2'-O-methyl ribonucleotide
  modified_base 100: mod_base = OTHER; note = 2'-O-methyl ribonucleotide
  modified_base 1..3: mod_base = OTHER; note = phosphorothioate linkage
  modified_base 25..26: mod_base = OTHER; note = phosphorothioate linkage
  modified_base 98..100: mod_base = OTHER; note = phosphorothioate linkage

SEQ ID NO: 2747 - RNA, 103 nt, synthetic construct; identical to SEQ ID NO: 1700
  source 1..103: mol_type = other RNA
  modified_base 1: mod_base = OTHER; note = 2'-O-methyl ribonucleotide
  modified_base 2: mod_base = OTHER; note = 2'-O-methyl ribonucleotide
  modified_base 3: mod_base = OTHER; note = 2'-O-methyl ribonucleotide
  modified_base 21: mod_base = OTHER; note = 2'-O-methyl ribonucleotide
  modified_base 28: mod_base = OTHER; note = 2'-O-methyl ribonucleotide
  modified_base 29: mod_base = OTHER; note = 2'-O-methyl ribonucleotide
  modified_base 30: mod_base = OTHER; note = 2'-O-methyl ribonucleotide
  modified_base 31: mod_base = OTHER; note = 2'-O-methyl ribonucleotide
  modified_base 32: mod_base = OTHER; note = 2'-O-methyl ribonucleotide
  modified_base 33: mod_base = OTHER; note = 2'-O-methyl ribonucleotide
  modified_base 34: mod_base = OTHER; note = 2'-O-methyl ribonucleotide
  modified_base 35: mod_base = OTHER; note = 2'-O-methyl ribonucleotide
  modified_base 36: mod_base = OTHER; note = 2'-O-methyl ribonucleotide
  modified_base 37: mod_base = OTHER; note = 2'-O-methyl ribonucleotide
  modified_base 38: mod_base = OTHER; note = 2'-O-methyl ribonucleotide
  modified_base 39: mod_base = OTHER; note = 2'-O-methyl ribonucleotide
  modified_base 40: mod_base = OTHER; note = 2'-O-methyl ribonucleotide
  modified_base 41: mod_base = OTHER; note = 2'-O-methyl ribonucleotide
  modified_base 42: mod_base = OTHER; note = 2'-O-methyl ribonucleotide
  modified_base 46: mod_base = OTHER; note = 2'-O-methyl ribonucleotide
  modified_base 48: mod_base = OTHER; note = 2'-O-methyl ribonucleotide
  modified_base 50: mod_base = OTHER; note = 2'-O-methyl ribonucleotide
  modified_base 52: mod_base = OTHER; note = 2'-O-methyl ribonucleotide
  modified_base 53: mod_base = OTHER; note = 2'-O-methyl ribonucleotide
  modified_base 54: mod_base = OTHER; note = 2'-O-methyl ribonucleotide
  modified_base 57: mod_base = OTHER; note = 2'-O-methyl ribonucleotide
  modified_base 61: mod_base = OTHER; note = 2'-O-methyl ribonucleotide
  modified_base 66: mod_base = OTHER; note = 2'-O-methyl ribonucleotide
  modified_base 67: mod_base = OTHER; note = 2'-O-methyl ribonucleotide
  modified_base 70: mod_base = OTHER; note = 2'-O-methyl ribonucleotide
  modified_base 71: mod_base = OTHER; note = 2'-O-methyl ribonucleotide
  modified_base 72: mod_base = OTHER; note = 2'-O-methyl ribonucleotide
  modified_base 74: mod_base = OTHER; note = 2'-O-methyl ribonucleotide
  modified_base 75: mod_base = OTHER; note = 2'-O-methyl ribonucleotide
  modified_base 76: mod_base = OTHER; note = 2'-O-methyl ribonucleotide
  modified_base 77: mod_base = OTHER; note = 2'-O-methyl ribonucleotide
  modified_base 78: mod_base = OTHER; note = 2'-O-methyl ribonucleotide
  modified_base 79: mod_base = OTHER; note = 2'-O-methyl ribonucleotide
  modified_base 80: mod_base = OTHER; note = 2'-O-methyl ribonucleotide
  modified_base 82: mod_base = OTHER; note = 2'-O-methyl ribonucleotide
  modified_base 83: mod_base = OTHER; note = 2'-O-methyl ribonucleotide
  modified_base 84: mod_base = OTHER; note = 2'-O-methyl ribonucleotide
  modified_base 85: mod_base = OTHER; note = 2'-O-methyl ribonucleotide
  modified_base 86: mod_base = OTHER; note = 2'-O-methyl ribonucleotide
  modified_base 87: mod_base = OTHER; note = 2'-O-methyl ribonucleotide
  modified_base 89: mod_base = OTHER; note = 2'-O-methyl ribonucleotide
  modified_base 92: mod_base = OTHER; note = 2'-O-methyl ribonucleotide
  modified_base 93: mod_base = OTHER; note = 2'-O-methyl ribonucleotide
  modified_base 94: mod_base = OTHER; note = 2'-O-methyl ribonucleotide
  modified_base 95: mod_base = OTHER; note = 2'-O-methyl ribonucleotide
  modified_base 96: mod_base = OTHER; note = 2'-O-methyl ribonucleotide
  modified_base 97: mod_base = OTHER; note = 2'-O-methyl ribonucleotide
  modified_base 98: mod_base = OTHER; note = 2'-O-methyl ribonucleotide
  modified_base 99: mod_base = OTHER; note = 2'-O-methyl ribonucleotide
  modified_base 100: mod_base = OTHER; note = 2'-O-methyl ribonucleotide
  modified_base 1..3: mod_base = OTHER; note = phosphorothioate linkage
  modified_base 25..26: mod_base = OTHER; note = phosphorothioate linkage
  modified_base 98..100: mod_base = OTHER; note = phosphorothioate linkage

SEQ ID NO: 2748 - RNA, 103 nt, synthetic construct; identical to SEQ ID NO: 1700
  source 1..103: mol_type = other RNA
  modified_base 1: mod_base = OTHER; note = 2'-O-methyl ribonucleotide
  modified_base 2: mod_base = OTHER; note = 2'-O-methyl ribonucleotide
  modified_base 3: mod_base = OTHER; note = 2'-O-methyl ribonucleotide
  modified_base 21: mod_base = OTHER; note = 2'-O-methyl ribonucleotide
  modified_base 28: mod_base = OTHER; note = 2'-O-methyl ribonucleotide
  modified_base 29: mod_base = OTHER; note = 2'-O-methyl ribonucleotide
  modified_base 30: mod_base = OTHER; note = 2'-O-methyl ribonucleotide
  modified_base 31: mod_base = OTHER; note = 2'-O-methyl ribonucleotide
  modified_base 32: mod_base = OTHER; note = 2'-O-methyl ribonucleotide
  modified_base 33: mod_base = OTHER; note = 2'-O-methyl ribonucleotide
  modified_base 34: mod_base = OTHER; note = 2'-O-methyl ribonucleotide
  modified_base 35: mod_base = OTHER; note = 2'-O-methyl ribonucleotide
  modified_base 36: mod_base = OTHER; note = 2'-O-methyl ribonucleotide
  modified_base 37: mod_base = OTHER; note = 2'-O-methyl ribonucleotide
  modified_base 38: mod_base = OTHER; note = 2'-O-methyl ribonucleotide
  modified_base 39: mod_base = OTHER; note = 2'-O-methyl ribonucleotide
  modified_base 40: mod_base = OTHER; note = 2'-O-methyl ribonucleotide
  modified_base 41: mod_base = OTHER; note = 2'-O-methyl ribonucleotide
  modified_base 42: mod_base = OTHER; note = 2'-O-methyl ribonucleotide
  modified_base 46: mod_base = OTHER; note = 2'-O-methyl ribonucleotide
  modified_base 48: mod_base = OTHER; note = 2'-O-methyl ribonucleotide
  modified_base 50: mod_base = OTHER; note = 2'-O-methyl ribonucleotide
  modified_base 52: mod_base = OTHER; note = 2'-O-methyl ribonucleotide
  modified_base 53: mod_base = OTHER; note = 2'-O-methyl ribonucleotide
  modified_base 54: mod_base = OTHER; note = 2'-O-methyl ribonucleotide
  modified_base 55: mod_base = OTHER; note = 2'-O-methyl ribonucleotide
  modified_base 56: mod_base = OTHER; note = 2'-O-methyl ribonucleotide
  modified_base 57: mod_base = OTHER; note = 2'-O-methyl ribonucleotide
  modified_base 60: mod_base = OTHER; note = 2'-O-methyl ribonucleotide
  modified_base 61: mod_base = OTHER; note = 2'-O-methyl ribonucleotide
  modified_base 66: mod_base = OTHER; note = 2'-O-methyl ribonucleotide
  modified_base 67: mod_base = OTHER; note = 2'-O-methyl ribonucleotide
  modified_base 70: mod_base = OTHER; note = 2'-O-methyl ribonucleotide
  modified_base 71: mod_base = OTHER; note = 2'-O-methyl ribonucleotide
  modified_base 72: mod_base = OTHER; note = 2'-O-methyl ribonucleotide
  modified_base 74: mod_base = OTHER; note = 2'-O-methyl ribonucleotide
  modified_base 75: mod_base = OTHER; note = 2'-O-methyl ribonucleotide
  modified_base 76: mod_base = OTHER; note = 2'-O-methyl ribonucleotide
  modified_base 77: mod_base = OTHER; note = 2'-O-methyl ribonucleotide
  modified_base 78: mod_base = OTHER; note = 2'-O-methyl ribonucleotide
  modified_base 79: mod_base = OTHER; note = 2'-O-methyl ribonucleotide
  modified_base 80: mod_base = OTHER; note = 2'-O-methyl ribonucleotide
  modified_base 82: mod_base = OTHER; note = 2'-O-methyl ribonucleotide
  modified_base 83: mod_base = OTHER; note = 2'-O-methyl ribonucleotide
  modified_base 84: mod_base = OTHER; note = 2'-O-methyl ribonucleotide
  modified_base 85: mod_base = OTHER; note = 2'-O-methyl ribonucleotide
  modified_base 86: mod_base = OTHER; note = 2'-O-methyl ribonucleotide
  modified_base 87: mod_base = OTHER; note = 2'-O-methyl ribonucleotide
  modified_base 89: mod_base = OTHER; note = 2'-O-methyl ribonucleotide
  modified_base 92: mod_base = OTHER; note = 2'-O-methyl ribonucleotide
  modified_base 93: mod_base = OTHER; note = 2'-O-methyl ribonucleotide
  modified_base 94: mod_base = OTHER; note = 2'-O-methyl ribonucleotide
  modified_base 95: mod_base = OTHER; note = 2'-O-methyl ribonucleotide
  modified_base 96: mod_base = OTHER; note = 2'-O-methyl ribonucleotide
  modified_base 97: mod_base = OTHER; note = 2'-O-methyl ribonucleotide
  modified_base 98: mod_base = OTHER; note = 2'-O-methyl ribonucleotide
  modified_base 99: mod_base = OTHER; note = 2'-O-methyl ribonucleotide
  modified_base 100: mod_base = OTHER; note = 2'-O-methyl ribonucleotide
  modified_base 1..3: mod_base = OTHER; note = phosphorothioate linkage
  modified_base 25..26: mod_base = OTHER; note = phosphorothioate linkage
  modified_base 98..100: mod_base = OTHER; note = phosphorothioate linkage

SEQ ID NO: 2749 - RNA, 103 nt, synthetic construct; identical to SEQ ID NO: 1700
  source 1..103: mol_type = other RNA
  modified_base 1: mod_base = OTHER; note = 2'-O-methyl ribonucleotide
  modified_base 2: mod_base = OTHER; note = 2'-O-methyl ribonucleotide
  modified_base 3: mod_base = OTHER; note = 2'-O-methyl ribonucleotide
  modified_base 21: mod_base = OTHER; note = 2'-O-methyl ribonucleotide
  modified_base 28: mod_base = OTHER; note = 2'-O-methyl ribonucleotide
  modified_base 29: mod_base = OTHER; note = 2'-O-methyl ribonucleotide
  modified_base 30: mod_base = OTHER; note = 2'-O-methyl ribonucleotide
  modified_base 31: mod_base = OTHER; note = 2'-O-methyl ribonucleotide
  modified_base 32: mod_base = OTHER; note = 2'-O-methyl ribonucleotide
  modified_base 33: mod_base = OTHER; note = 2'-O-methyl ribonucleotide
  modified_base 34: mod_base = OTHER; note = 2'-O-methyl ribonucleotide
  modified_base 35: mod_base = OTHER; note = 2'-O-methyl ribonucleotide
  modified_base 36: mod_base = OTHER; note = 2'-O-methyl ribonucleotide
  modified_base 37: mod_base = OTHER; note = 2'-O-methyl ribonucleotide
  modified_base 38: mod_base = OTHER; note = 2'-O-methyl ribonucleotide
  modified_base 39: mod_base = OTHER; note = 2'-O-methyl ribonucleotide
  modified_base 40: mod_base = OTHER; note = 2'-O-methyl ribonucleotide
  modified_base 41: mod_base = OTHER; note = 2'-O-methyl ribonucleotide
  modified_base 42: mod_base = OTHER; note = 2'-O-methyl ribonucleotide
  modified_base 46: mod_base = OTHER; note = 2'-O-methyl ribonucleotide
  modified_base 48: mod_base = OTHER; note = 2'-O-methyl ribonucleotide
  modified_base 50: mod_base = OTHER; note = 2'-O-methyl ribonucleotide
  modified_base 52: mod_base = OTHER; note = 2'-O-methyl ribonucleotide
  modified_base 53: mod_base = OTHER; note = 2'-O-methyl ribonucleotide
  modified_base 54: mod_base = OTHER; note = 2'-O-methyl ribonucleotide
  modified_base 57: mod_base = OTHER; note = 2'-O-methyl ribonucleotide
  modified_base 61: mod_base = OTHER; note = 2'-O-methyl ribonucleotide
  modified_base 66: mod_base = OTHER; note = 2'-O-methyl ribonucleotide
  modified_base 67: mod_base = OTHER; note = 2'-O-methyl ribonucleotide
  modified_base 70: mod_base = OTHER; note = 2'-O-methyl ribonucleotide
  modified_base 71: mod_base = OTHER; note = 2'-O-methyl ribonucleotide
  modified_base 72: mod_base = OTHER; note = 2'-O-methyl ribonucleotide
  modified_base 73: mod_base = OTHER; note = 2'-O-methyl ribonucleotide
  modified_base 74: mod_base = OTHER; note = 2'-O-methyl ribonucleotide
  modified_base 75: mod_base = OTHER; note = 2'-O-methyl ribonucleotide
  modified_base 76: mod_base = OTHER; note = 2'-O-methyl ribonucleotide
  modified_base 77: mod_base = OTHER; note = 2'-O-methyl ribonucleotide
  modified_base 78: mod_base = OTHER; note = 2'-O-methyl ribonucleotide
  modified_base 79: mod_base = OTHER; note = 2'-O-methyl ribonucleotide
  modified_base 80: mod_base = OTHER; note = 2'-O-methyl ribonucleotide
  modified_base 82: mod_base = OTHER; note = 2'-O-methyl ribonucleotide
  modified_base 83: mod_base = OTHER; note = 2'-O-methyl ribonucleotide
  modified_base 84: mod_base = OTHER; note = 2'-O-methyl ribonucleotide
  modified_base 85: mod_base = OTHER; note = 2'-O-methyl ribonucleotide
  modified_base 86: mod_base = OTHER; note = 2'-O-methyl ribonucleotide
  modified_base 87: mod_base = OTHER; note = 2'-O-methyl ribonucleotide
  modified_base 89: mod_base = OTHER; note = 2'-O-methyl ribonucleotide
  modified_base 92: mod_base = OTHER; note = 2'-O-methyl ribonucleotide
  modified_base 93: mod_base = OTHER; note = 2'-O-methyl ribonucleotide
  modified_base 94: mod_base = OTHER; note = 2'-O-methyl ribonucleotide
  modified_base 95: mod_base = OTHER; note = 2'-O-methyl ribonucleotide
  modified_base 96: mod_base = OTHER; note = 2'-O-methyl ribonucleotide
  modified_base 97: mod_base = OTHER; note = 2'-O-methyl ribonucleotide
  modified_base 98: mod_base = OTHER; note = 2'-O-methyl ribonucleotide
  modified_base 99: mod_base = OTHER; note = 2'-O-methyl ribonucleotide
  modified_base 100: mod_base = OTHER; note = 2'-O-methyl ribonucleotide
  modified_base 1..3: mod_base = OTHER; note = phosphorothioate linkage
  modified_base 25..26: mod_base = OTHER; note = phosphorothioate linkage
  modified_base 98..100: mod_base = OTHER; note = phosphorothioate linkage

SEQ ID NO: 2750 - RNA, 103 nt, synthetic construct; identical to SEQ ID NO: 1700
  source 1..103: mol_type = other RNA
  modified_base 1: mod_base = OTHER; note = 2'-O-methyl ribonucleotide
  modified_base 2: mod_base = OTHER; note = 2'-O-methyl ribonucleotide
  modified_base 3: mod_base = OTHER; note = 2'-O-methyl ribonucleotide
  modified_base 21: mod_base = OTHER; note = 2'-O-methyl ribonucleotide
  modified_base 28: mod_base = OTHER; note = 2'-O-methyl ribonucleotide
  modified_base 29: mod_base = OTHER; note = 2'-O-methyl ribonucleotide
  modified_base 30: mod_base = OTHER; note = 2'-O-methyl ribonucleotide
  modified_base 31: mod_base = OTHER; note = 2'-O-methyl ribonucleotide
  modified_base 32: mod_base = OTHER; note = 2'-O-methyl ribonucleotide
  modified_base 33: mod_base = OTHER; note = 2'-O-methyl ribonucleotide
  modified_base 34: mod_base = OTHER; note = 2'-O-methyl ribonucleotide
  modified_base 35: mod_base = OTHER; note = 2'-O-methyl ribonucleotide
  modified_base 36: mod_base = OTHER; note = 2'-O-methyl ribonucleotide
  modified_base 37: mod_base = OTHER; note = 2'-O-methyl ribonucleotide
  modified_base 38: mod_base = OTHER; note = 2'-O-methyl ribonucleotide
  modified_base 39: mod_base = OTHER; note = 2'-O-methyl ribonucleotide
  modified_base 40: mod_base = OTHER; note = 2'-O-methyl ribonucleotide
  modified_base 41: mod_base = OTHER; note = 2'-O-methyl ribonucleotide
  modified_base 42: mod_base = OTHER; note = 2'-O-methyl ribonucleotide
  modified_base 46: mod_base = OTHER; note = 2'-O-methyl ribonucleotide
  modified_base 48: mod_base = OTHER; note = 2'-O-methyl ribonucleotide
  modified_base 50: mod_base = OTHER; note = 2'-O-methyl ribonucleotide
  modified_base 52: mod_base = OTHER; note = 2'-O-methyl ribonucleotide
  modified_base 53: mod_base = OTHER; note = 2'-O-methyl ribonucleotide
  modified_base 54: mod_base = OTHER; note = 2'-O-methyl ribonucleotide
  modified_base 57: mod_base = OTHER; note = 2'-O-methyl ribonucleotide
  modified_base 61: mod_base = OTHER; note = 2'-O-methyl ribonucleotide
  modified_base 66: mod_base = OTHER; note = 2'-O-methyl ribonucleotide
  modified_base 67: mod_base = OTHER; note = 2'-O-methyl ribonucleotide
  modified_base 70: mod_base = OTHER; note = 2'-O-methyl ribonucleotide
  modified_base 71: mod_base = OTHER; note = 2'-O-methyl ribonucleotide
  modified_base 72: mod_base = OTHER; note = 2'-O-methyl ribonucleotide
  modified_base 73: mod_base = OTHER; note = 2'-O-methyl ribonucleotide
  modified_base 74: mod_base = OTHER; note = 2'-O-methyl ribonucleotide
  modified_base 75: mod_base = OTHER; note = 2'-O-methyl ribonucleotide
  modified_base 76: mod_base = OTHER; note = 2'-O-methyl ribonucleotide
  modified_base 77: mod_base = OTHER; note = 2'-O-methyl ribonucleotide
  modified_base 78: mod_base = OTHER; note = 2'-O-methyl ribonucleotide
  modified_base 79: mod_base = OTHER; note = 2'-O-methyl ribonucleotide
  modified_base 80: mod_base = OTHER; note = 2'-O-methyl ribonucleotide
  modified_base 82: mod_base = OTHER; note = 2'-O-methyl ribonucleotide
  modified_base 83: mod_base = OTHER; note = 2'-O-methyl ribonucleotide
  modified_base 84: mod_base = OTHER; note = 2'-O-methyl ribonucleotide
  modified_base 85: mod_base = OTHER; note = 2'-O-methyl ribonucleotide
  modified_base 86: mod_base = OTHER; note = 2'-O-methyl ribonucleotide
  modified_base 87: mod_base = OTHER; note = 2'-O-methyl ribonucleotide
  modified_base 89: mod_base = OTHER; note = 2'-O-methyl ribonucleotide
  modified_base 91: mod_base = OTHER; note = 2'-O-methyl ribonucleotide
  modified_base 92: mod_base = OTHER; note = 2'-O-methyl ribonucleotide
  modified_base 93: mod_base = OTHER; note = 2'-O-methyl ribonucleotide
  modified_base 94: mod_base = OTHER; note = 2'-O-methyl ribonucleotide
  modified_base 95: mod_base = OTHER; note = 2'-O-methyl ribonucleotide
  modified_base 96: mod_base = OTHER; note = 2'-O-methyl ribonucleotide
  modified_base 97: mod_base = OTHER; note = 2'-O-methyl ribonucleotide
  modified_base 98: mod_base = OTHER; note = 2'-O-methyl ribonucleotide
  modified_base 99: mod_base = OTHER; note = 2'-O-methyl ribonucleotide
  modified_base 100: mod_base = OTHER; note = 2'-O-methyl ribonucleotide
  modified_base 1..3: mod_base = OTHER; note = phosphorothioate linkage
  modified_base 25..26: mod_base = OTHER; note = phosphorothioate linkage
  modified_base 98..100: mod_base = OTHER; note = phosphorothioate linkage

SEQ ID NO: 2751 - RNA, 103 nt, synthetic construct; identical to SEQ ID NO: 1700
  source 1..103: mol_type = other RNA
  modified_base 1: mod_base = OTHER; note = 2'-O-methyl ribonucleotide
  modified_base 2: mod_base = OTHER; note = 2'-O-methyl ribonucleotide
  modified_base 3: mod_base = OTHER; note = 2'-O-methyl ribonucleotide
  modified_base 21: mod_base = OTHER; note = 2'-O-methyl ribonucleotide
  modified_base 28: mod_base = OTHER; note = 2'-O-methyl ribonucleotide
  modified_base 29: mod_base = OTHER; note = 2'-O-methyl ribonucleotide
  modified_base 30: mod_base = OTHER; note = 2'-O-methyl ribonucleotide
  modified_base 31: mod_base = OTHER; note = 2'-O-methyl ribonucleotide
  modified_base 32: mod_base = OTHER; note = 2'-O-methyl ribonucleotide
  modified_base 34: mod_base = OTHER; note = 2'-O-methyl ribonucleotide
  modified_base 35: mod_base = OTHER; note = 2'-O-methyl ribonucleotide
  modified_base 36: mod_base = OTHER; note = 2'-O-methyl ribonucleotide
  modified_base 37: mod_base = OTHER; note = 2'-O-methyl ribonucleotide
  modified_base 38: mod_base = OTHER; note = 2'-O-methyl ribonucleotide
  modified_base 39: mod_base = OTHER; note = 2'-O-methyl ribonucleotide
  modified_base 40: mod_base = OTHER; note = 2'-O-methyl ribonucleotide
  modified_base 41: mod_base = OTHER; note = 2'-O-methyl ribonucleotide
  modified_base 42: mod_base = OTHER; note = 2'-O-methyl ribonucleotide
  modified_base 46: mod_base = OTHER; note = 2'-O-methyl ribonucleotide
  modified_base 48: mod_base = OTHER; note = 2'-O-methyl ribonucleotide
  modified_base 50: mod_base = OTHER; note = 2'-O-methyl ribonucleotide
  modified_base 52: mod_base = OTHER; note = 2'-O-methyl ribonucleotide
  modified_base 53: mod_base = OTHER; note = 2'-O-methyl ribonucleotide
  modified_base 54: mod_base = OTHER; note = 2'-O-methyl ribonucleotide
  modified_base 57: mod_base = OTHER; note = 2'-O-methyl ribonucleotide
  modified_base 61: mod_base = OTHER; note = 2'-O-methyl ribonucleotide
  modified_base 66: mod_base = OTHER; note = 2'-O-methyl ribonucleotide
  modified_base 67: mod_base = OTHER; note = 2'-O-methyl ribonucleotide
  modified_base 70: mod_base = OTHER; note = 2'-O-methyl ribonucleotide
  modified_base 71: mod_base = OTHER; note = 2'-O-methyl ribonucleotide
  modified_base 72: mod_base = OTHER; note = 2'-O-methyl ribonucleotide
  modified_base 73: mod_base = OTHER; note = 2'-O-methyl ribonucleotide
  modified_base 74: mod_base = OTHER; note = 2'-O-methyl ribonucleotide
  modified_base 75: mod_base = OTHER; note = 2'-O-methyl ribonucleotide
  modified_base 76: mod_base = OTHER; note = 2'-O-methyl ribonucleotide
  modified_base 77: mod_base = OTHER; note = 2'-O-methyl ribonucleotide
  modified_base 78: mod_base = OTHER; note = 2'-O-methyl ribonucleotide
  modified_base 79: mod_base = OTHER; note = 2'-O-methyl ribonucleotide
  modified_base 80: mod_base = OTHER; note = 2'-O-methyl ribonucleotide
  modified_base 82: mod_base = OTHER; note = 2'-O-methyl ribonucleotide
  modified_base 83: mod_base = OTHER; note = 2'-O-methyl ribonucleotide
  modified_base 84: mod_base = OTHER; note = 2'-O-methyl ribonucleotide
  modified_base 85: mod_base = OTHER; note = 2'-O-methyl ribonucleotide
  modified_base 86: mod_base = OTHER; note = 2'-O-methyl ribonucleotide
  modified_base 87: mod_base = OTHER; note = 2'-O-methyl ribonucleotide
  modified_base 89: mod_base = OTHER; note = 2'-O-methyl ribonucleotide
  modified_base 91: mod_base = OTHER; note = 2'-O-methyl ribonucleotide
  modified_base 92: mod_base = OTHER; note = 2'-O-methyl ribonucleotide
  modified_base 93: mod_base = OTHER; note = 2'-O-methyl ribonucleotide
  modified_base 94: mod_base = OTHER; note = 2'-O-methyl ribonucleotide
  modified_base 95: mod_base = OTHER; note = 2'-O-methyl ribonucleotide
  modified_base 96: mod_base = OTHER; note = 2'-O-methyl ribonucleotide
  modified_base 97: mod_base = OTHER; note = 2'-O-methyl ribonucleotide
  modified_base 98: mod_base = OTHER; note = 2'-O-methyl ribonucleotide
  modified_base 99: mod_base = OTHER; note = 2'-O-methyl ribonucleotide
  modified_base 100: mod_base = OTHER; note = 2'-O-methyl ribonucleotide
  modified_base 1..3: mod_base = OTHER; note = phosphorothioate linkage
  modified_base 25..26: mod_base = OTHER; note = phosphorothioate linkage
  modified_base 98..100: mod_base = OTHER; note = phosphorothioate linkage

SEQ ID NO: 2752 - RNA, 103 nt, synthetic construct; identical to SEQ ID NO: 1700
  source 1..103: mol_type = other RNA
  modified_base 1: mod_base = OTHER; note = 2'-O-methyl ribonucleotide
  modified_base 2: mod_base = OTHER; note = 2'-O-methyl ribonucleotide
  modified_base 3: mod_base = OTHER; note = 2'-O-methyl ribonucleotide
  modified_base 21: mod_base = OTHER; note = 2'-O-methyl ribonucleotide
  modified_base 28: mod_base = OTHER; note = 2'-O-methyl ribonucleotide
  modified_base 29: mod_base = OTHER; note = 2'-O-methyl ribonucleotide
  modified_base 30: mod_base = OTHER; note = 2'-O-methyl ribonucleotide
  modified_base 31: mod_base = OTHER; note = 2'-O-methyl ribonucleotide
  modified_base 32: mod_base = OTHER; note = 2'-O-methyl ribonucleotide
  modified_base 34: mod_base = OTHER; note = 2'-O-methyl ribonucleotide
  modified_base 35: mod_base = OTHER; note = 2'-O-methyl ribonucleotide
  modified_base 36: mod_base = OTHER; note = 2'-O-methyl ribonucleotide
  modified_base 37: mod_base = OTHER; note = 2'-O-methyl ribonucleotide
  modified_base 38: mod_base = OTHER; note = 2'-O-methyl ribonucleotide
  modified_base 39: mod_base = OTHER; note = 2'-O-methyl ribonucleotide
  modified_base 40: mod_base = OTHER; note = 2'-O-methyl ribonucleotide
  modified_base 41: mod_base = OTHER; note = 2'-O-methyl ribonucleotide
  modified_base 42: mod_base = OTHER; note = 2'-O-methyl ribonucleotide
  modified_base 46: mod_base = OTHER; note = 2'-O-methyl ribonucleotide
  modified_base 48: mod_base = OTHER; note = 2'-O-methyl ribonucleotide
  modified_base 50: mod_base = OTHER; note = 2'-O-methyl ribonucleotide
  modified_base 52: mod_base = OTHER; note = 2'-O-methyl ribonucleotide
  modified_base 53: mod_base = OTHER; note = 2'-O-methyl ribonucleotide
  modified_base 54: mod_base = OTHER; note = 2'-O-methyl ribonucleotide
  modified_base 55: mod_base = OTHER; note = 2'-O-methyl ribonucleotide
  modified_base 56: mod_base = OTHER; note = 2'-O-methyl ribonucleotide
  modified_base 57: mod_base = OTHER; note = 2'-O-methyl ribonucleotide
  modified_base 60: mod_base = OTHER; note = 2'-O-methyl ribonucleotide
  modified_base 61: mod_base = OTHER; note = 2'-O-methyl ribonucleotide
  modified_base 66: mod_base = OTHER; note = 2'-O-methyl ribonucleotide
  modified_base 67: mod_base = OTHER; note = 2'-O-methyl ribonucleotide
  modified_base 70: mod_base = OTHER; note = 2'-O-methyl ribonucleotide
  modified_base 71: mod_base = OTHER; note = 2'-O-methyl ribonucleotide
  modified_base 72: mod_base = OTHER; note = 2'-O-methyl ribonucleotide
  modified_base 74: mod_base = OTHER; note = 2'-O-methyl ribonucleotide
  modified_base 75: mod_base = OTHER; note = 2'-O-methyl ribonucleotide
  modified_base 76: mod_base = OTHER; note = 2'-O-methyl ribonucleotide
  modified_base 77: mod_base = OTHER; note = 2'-O-methyl ribonucleotide
  modified_base 78: mod_base = OTHER; note = 2'-O-methyl ribonucleotide
  modified_base 79: mod_base = OTHER; note = 2'-O-methyl ribonucleotide
  modified_base 80: mod_base = OTHER; note = 2'-O-methyl ribonucleotide
  modified_base 82: mod_base = OTHER; note = 2'-O-methyl ribonucleotide
  modified_base 83: mod_base = OTHER; note = 2'-O-methyl ribonucleotide
  modified_base 84: mod_base = OTHER; note = 2'-O-methyl ribonucleotide
  modified_base 85: mod_base = OTHER; note = 2'-O-methyl ribonucleotide
  modified_base 86: mod_base = OTHER; note = 2'-O-methyl ribonucleotide
  modified_base 87: mod_base = OTHER; note = 2'-O-methyl ribonucleotide
  modified_base 89: mod_base = OTHER; note = 2'-O-methyl ribonucleotide
  modified_base 92: mod_base = OTHER; note = 2'-O-methyl ribonucleotide
  modified_base 93: mod_base = OTHER; note = 2'-O-methyl ribonucleotide
  modified_base 94: mod_base = OTHER; note = 2'-O-methyl ribonucleotide
  modified_base 95: mod_base = OTHER; note = 2'-O-methyl ribonucleotide
  modified_base 96: mod_base = OTHER; note = 2'-O-methyl ribonucleotide
  modified_base 97: mod_base = OTHER; note = 2'-O-methyl ribonucleotide
  modified_base 98: mod_base = OTHER; note = 2'-O-methyl ribonucleotide
  modified_base 99: mod_base = OTHER; note = 2'-O-methyl ribonucleotide
  modified_base 100: mod_base = OTHER; note = 2'-O-methyl ribonucleotide
  modified_base 1..3: mod_base = OTHER; note = phosphorothioate linkage
  modified_base 25..26: mod_base = OTHER; note = phosphorothioate linkage
  modified_base 98..100: mod_base = OTHER; note = phosphorothioate linkage

SEQ ID NO: 2753 - RNA, 103 nt, synthetic construct; identical to SEQ ID NO: 1643
  source 1..103: mol_type = other RNA
  modified_base 1: mod_base = OTHER; note = 2'-O-methyl ribonucleotide
  modified_base 2: mod_base = OTHER; note = 2'-O-methyl ribonucleotide
  modified_base 3: mod_base = OTHER; note = 2'-O-methyl ribonucleotide
  modified_base 21: mod_base = OTHER; note = 2'-O-methyl ribonucleotide
  modified_base 28: mod_base = OTHER; note = 2'-O-methyl ribonucleotide
  modified_base 29: mod_base = OTHER; note = 2'-O-methyl ribonucleotide
  modified_base 30: mod_base = OTHER; note = 2'-O-methyl ribonucleotide
  modified_base 31: mod_base = OTHER; note = 2'-O-methyl ribonucleotide
  modified_base 32: mod_base = OTHER; note = 2'-O-methyl ribonucleotide
  modified_base 33: mod_base = OTHER; note = 2'-O-methyl ribonucleotide
  modified_base 34: mod_base = OTHER; note = 2'-O-methyl ribonucleotide
  modified_base 35: mod_base = OTHER; note = 2'-O-methyl ribonucleotide
  modified_base 36: mod_base = OTHER; note = 2'-O-methyl ribonucleotide
  modified_base 37: mod_base = OTHER; note = 2'-O-methyl ribonucleotide
  modified_base 38: mod_base = OTHER; note = 2'-O-methyl ribonucleotide
  modified_base 39: mod_base = OTHER; note = 2'-O-methyl ribonucleotide
  modified_base 40: mod_base = OTHER; note = 2'-O-methyl ribonucleotide
  modified_base 41: mod_base = OTHER; note = 2'-O-methyl ribonucleotide
  modified_base 42: mod_base = OTHER; note = 2'-O-methyl ribonucleotide
  modified_base 46: mod_base = OTHER; note = 2'-O-methyl ribonucleotide
  modified_base 48: mod_base = OTHER; note = 2'-O-methyl ribonucleotide
  modified_base 50: mod_base = OTHER; note = 2'-O-methyl ribonucleotide
  modified_base 52: mod_base = OTHER; note = 2'-O-methyl ribonucleotide
  modified_base 53: mod_base = OTHER; note = 2'-O-methyl ribonucleotide
  modified_base 54: mod_base = OTHER; note = 2'-O-methyl ribonucleotide
  modified_base 55: mod_base = OTHER; note = 2'-O-methyl ribonucleotide
  modified_base 56: mod_base = OTHER; note = 2'-O-methyl ribonucleotide
  modified_base 57: mod_base = OTHER; note = 2'-O-methyl ribonucleotide
  modified_base 60: mod_base = OTHER; note = 2'-O-methyl ribonucleotide
  modified_base 61: mod_base = OTHER; note = 2'-O-methyl ribonucleotide
  modified_base 66: mod_base = OTHER; note = 2'-O-methyl ribonucleotide
  modified_base 67: mod_base = OTHER; note = 2'-O-methyl ribonucleotide
  modified_base 70: mod_base = OTHER; note = 2'-O-methyl ribonucleotide
  modified_base 71: mod_base = OTHER; note = 2'-O-methyl ribonucleotide
  modified_base 72: mod_base = OTHER; note = 2'-O-methyl ribonucleotide
  modified_base 73: mod_base = OTHER; note = 2'-O-methyl ribonucleotide
  modified_base 74: mod_base = OTHER; note = 2'-O-methyl ribonucleotide
  modified_base 75: mod_base = OTHER; note = 2'-O-methyl ribonucleotide
  modified_base 76: mod_base = OTHER; note = 2'-O-methyl ribonucleotide
  modified_base 77: mod_base = OTHER; note = 2'-O-methyl ribonucleotide
  modified_base 78: mod_base = OTHER; note = 2'-O-methyl ribonucleotide
  modified_base 79: mod_base = OTHER; note = 2'-O-methyl ribonucleotide
  modified_base 80: mod_base = OTHER; note = 2'-O-methyl ribonucleotide
  modified_base 81: mod_base = OTHER; note = 2'-O-methyl ribonucleotide
  modified_base 83: mod_base = OTHER; note = 2'-O-methyl ribonucleotide
  modified_base 84: mod_base = OTHER; note = 2'-O-methyl ribonucleotide
  modified_base 85: mod_base = OTHER; note = 2'-O-methyl ribonucleotide
  modified_base 86: mod_base = OTHER; note = 2'-O-methyl ribonucleotide
  modified_base 87: mod_base = OTHER; note = 2'-O-methyl ribonucleotide
  modified_base 88: mod_base = OTHER; note = 2'-O-methyl ribonucleotide
  modified_base 89: mod_base = OTHER; note = 2'-O-methyl ribonucleotide
  modified_base 90: mod_base = OTHER; note = 2'-O-methyl ribonucleotide
  modified_base 91: mod_base = OTHER; note = 2'-O-methyl ribonucleotide
  modified_base 92: mod_base = OTHER; note = 2'-O-methyl ribonucleotide
  modified_base 93: mod_base = OTHER; note = 2'-O-methyl ribonucleotide
  modified_base 94: mod_base = OTHER; note = 2'-O-methyl ribonucleotide
  modified_base 95: mod_base = OTHER; note = 2'-O-methyl ribonucleotide
  modified_base 96: mod_base = OTHER; note = 2'-O-methyl ribonucleotide
  modified_base 97: mod_base = OTHER; note = 2'-O-methyl ribonucleotide
  modified_base 98: mod_base = OTHER; note = 2'-O-methyl ribonucleotide
  modified_base 99: mod_base = OTHER; note = 2'-O-methyl ribonucleotide
  modified_base 100: mod_base = OTHER; note = 2'-O-methyl ribonucleotide
  modified_base 1..3: mod_base = OTHER; note = phosphorothioate linkage
  modified_base 45..46: mod_base = OTHER; note = phosphorothioate linkage
  modified_base 64..65: mod_base = OTHER; note = phosphorothioate linkage
  modified_base 98..100: mod_base = OTHER; note = phosphorothioate linkage

SEQ ID NO: 2754 - RNA, 103 nt, synthetic construct; identical to SEQ ID NO: 1643
  source 1..103: mol_type = other RNA
  modified_base 1: mod_base = OTHER; note = 2'-O-methyl ribonucleotide
  modified_base 2: mod_base = OTHER; note = 2'-O-methyl ribonucleotide
  modified_base 3: mod_base = OTHER; note = 2'-O-methyl ribonucleotide
  modified_base 21: mod_base = OTHER; note = 2'-O-methyl ribonucleotide
  modified_base 28: mod_base = OTHER; note = 2'-O-methyl ribonucleotide
  modified_base 29: mod_base = OTHER; note = 2'-O-methyl ribonucleotide
  modified_base 30: mod_base = OTHER; note = 2'-O-methyl ribonucleotide
  modified_base 31: mod_base = OTHER; note = 2'-O-methyl ribonucleotide
  modified_base 32: mod_base = OTHER; note = 2'-O-methyl ribonucleotide
  modified_base 34: mod_base = OTHER; note = 2'-O-methyl ribonucleotide
  modified_base 35: mod_base = OTHER; note = 2'-O-methyl ribonucleotide
  modified_base 36: mod_base = OTHER; note = 2'-O-methyl ribonucleotide
  modified_base 37: mod_base = OTHER; note = 2'-O-methyl ribonucleotide
  modified_base 38: mod_base = OTHER; note = 2'-O-methyl ribonucleotide
  modified_base 39: mod_base = OTHER; note = 2'-O-methyl ribonucleotide
  modified_base 40: mod_base = OTHER; note = 2'-O-methyl ribonucleotide
  modified_base 41: mod_base = OTHER; note = 2'-O-methyl ribonucleotide
  modified_base 42: mod_base = OTHER; note = 2'-O-methyl ribonucleotide
  modified_base 46: mod_base = OTHER; note = 2'-O-methyl ribonucleotide
  modified_base 48: mod_base = OTHER; note = 2'-O-methyl ribonucleotide
  modified_base 50: mod_base = OTHER; note = 2'-O-methyl ribonucleotide
  modified_base 52: mod_base = OTHER; note = 2'-O-methyl ribonucleotide
  modified_base 53: mod_base = OTHER; note = 2'-O-methyl ribonucleotide
  modified_base 54: mod_base = OTHER; note = 2'-O-methyl ribonucleotide
  modified_base 55: mod_base = OTHER; note = 2'-O-methyl ribonucleotide
  modified_base 56: mod_base = OTHER; note = 2'-O-methyl ribonucleotide
  modified_base 57: mod_base = OTHER; note = 2'-O-methyl ribonucleotide
  modified_base 60: mod_base = OTHER; note = 2'-O-methyl ribonucleotide
  modified_base 61: mod_base = OTHER; note = 2'-O-methyl ribonucleotide
  modified_base 66: mod_base = OTHER; note = 2'-O-methyl ribonucleotide
  modified_base 67: mod_base = OTHER; note = 2'-O-methyl ribonucleotide
  modified_base 70: mod_base = OTHER; note = 2'-O-methyl ribonucleotide
  modified_base 71: mod_base = OTHER; note = 2'-O-methyl ribonucleotide
  modified_base 72: mod_base = OTHER; note = 2'-O-methyl ribonucleotide
  modified_base 74: mod_base = OTHER; note = 2'-O-methyl ribonucleotide
  modified_base 75: mod_base = OTHER; note = 2'-O-methyl ribonucleotide
  modified_base 76: mod_base = OTHER; note = 2'-O-methyl ribonucleotide
  modified_base 77: mod_base = OTHER; note = 2'-O-methyl ribonucleotide
  modified_base 78: mod_base = OTHER; note = 2'-O-methyl ribonucleotide
  modified_base 79: mod_base = OTHER; note = 2'-O-methyl ribonucleotide
  modified_base 80: mod_base = OTHER; note = 2'-O-methyl ribonucleotide
  modified_base 81: mod_base = OTHER; note = 2'-O-methyl ribonucleotide
  modified_base 83: mod_base = OTHER; note = 2'-O-methyl ribonucleotide
  modified_base 84: mod_base = OTHER; note = 2'-O-methyl ribonucleotide
  modified_base 85: mod_base = OTHER; note = 2'-O-methyl ribonucleotide
  modified_base 86: mod_base = OTHER; note = 2'-O-methyl ribonucleotide
  modified_base 87: mod_base = OTHER; note = 2'-O-methyl ribonucleotide
  modified_base 88: mod_base = OTHER; note = 2'-O-methyl ribonucleotide
  modified_base 89: mod_base = OTHER; note = 2'-O-methyl ribonucleotide
  modified_base 90: mod_base = OTHER; note = 2'-O-methyl ribonucleotide
  modified_base 91: mod_base = OTHER; note = 2'-O-methyl ribonucleotide
  modified_base 92: mod_base = OTHER; note = 2'-O-methyl ribonucleotide
  modified_base 93: mod_base = OTHER; note = 2'-O-methyl ribonucleotide
  modified_base 94: mod_base = OTHER; note = 2'-O-methyl ribonucleotide
  modified_base 95: mod_base = OTHER; note = 2'-O-methyl ribonucleotide
  modified_base 96: mod_base = OTHER; note = 2'-O-methyl ribonucleotide
  modified_base 97: mod_base = OTHER; note = 2'-O-methyl ribonucleotide
  modified_base 98: mod_base = OTHER; note = 2'-O-methyl ribonucleotide
  modified_base 99: mod_base = OTHER; note = 2'-O-methyl ribonucleotide
  modified_base 100: mod_base = OTHER; note = 2'-O-methyl ribonucleotide
  modified_base 1..3: mod_base = OTHER; note = phosphorothioate linkage
  modified_base 45..46: mod_base = OTHER; note = phosphorothioate linkage
  modified_base 64..65: mod_base = OTHER; note = phosphorothioate linkage
  modified_base 98..100: mod_base = OTHER; note = phosphorothioate linkage

SEQ ID NO: 2755 - RNA, 103 nt, synthetic construct; identical to SEQ ID NO: 1699
  source 1..103: mol_type = other RNA
  modified_base 1: mod_base = OTHER; note = 2'-O-methyl ribonucleotide
  modified_base 2: mod_base = OTHER; note = 2'-O-methyl ribonucleotide
  modified_base 3: mod_base = OTHER; note = 2'-O-methyl ribonucleotide
  modified_base 21: mod_base = OTHER; note = 2'-O-methyl ribonucleotide
  modified_base 28: mod_base = OTHER; note = 2'-O-methyl ribonucleotide
  modified_base 29: mod_base = OTHER; note = 2'-O-methyl ribonucleotide
  modified_base 30: mod_base = OTHER; note = 2'-O-methyl ribonucleotide
  modified_base 31: mod_base = OTHER; note = 2'-O-methyl ribonucleotide
  modified_base 32: mod_base = OTHER; note = 2'-O-methyl ribonucleotide
  modified_base 33: mod_base = OTHER; note = 2'-O-methyl ribonucleotide
  modified_base 34: mod_base = OTHER; note = 2'-O-methyl ribonucleotide
  modified_base 35: mod_base = OTHER; note = 2'-O-methyl ribonucleotide
  modified_base 36: mod_base = OTHER; note = 2'-O-methyl ribonucleotide
  modified_base 37: mod_base = OTHER; note = 2'-O-methyl ribonucleotide
  modified_base 38: mod_base = OTHER; note = 2'-O-methyl ribonucleotide
  modified_base 39: mod_base = OTHER; note = 2'-O-methyl ribonucleotide
  modified_base 40: mod_base = OTHER; note = 2'-O-methyl ribonucleotide
  modified_base 41: mod_base = OTHER; note = 2'-O-methyl ribonucleotide
  modified_base 42: mod_base = OTHER; note = 2'-O-methyl ribonucleotide
  modified_base 46: mod_base = OTHER; note = 2'-O-methyl ribonucleotide
  modified_base 48: mod_base = OTHER; note = 2'-O-methyl ribonucleotide
  modified_base 50: mod_base = OTHER; note = 2'-O-methyl ribonucleotide
  modified_base 52: mod_base = OTHER; note = 2'-O-methyl ribonucleotide
  modified_base 53: mod_base = OTHER; note = 2'-O-methyl ribonucleotide
  modified_base 54: mod_base = OTHER; note = 2'-O-methyl ribonucleotide
  modified_base 55: mod_base = OTHER; note = 2'-O-methyl ribonucleotide
  modified_base 56: mod_base = OTHER; note = 2'-O-methyl ribonucleotide
  modified_base 57: mod_base = OTHER; note = 2'-O-methyl ribonucleotide
  modified_base 60: mod_base = OTHER; note = 2'-O-methyl ribonucleotide
  modified_base 61: mod_base = OTHER; note = 2'-O-methyl ribonucleotide
  modified_base 66: mod_base = OTHER; note = 2'-O-methyl ribonucleotide
  modified_base 67: mod_base = OTHER; note = 2'-O-methyl ribonucleotide
  modified_base 70: mod_base = OTHER; note = 2'-O-methyl ribonucleotide
  modified_base 71: mod_base = OTHER; note = 2'-O-methyl ribonucleotide
  modified_base 72: mod_base = OTHER; note = 2'-O-methyl ribonucleotide
  modified_base 73: mod_base = OTHER; note = 2'-O-methyl ribonucleotide
  modified_base 74: mod_base = OTHER; note = 2'-O-methyl ribonucleotide
  modified_base 75: mod_base = OTHER; note = 2'-O-methyl ribonucleotide
  modified_base 76: mod_base = OTHER; note = 2'-O-methyl ribonucleotide
  modified_base 77: mod_base = OTHER; note = 2'-O-methyl ribonucleotide
  modified_base 78: mod_base = OTHER; note = 2'-O-methyl ribonucleotide
  modified_base 79: mod_base = OTHER; note = 2'-O-methyl ribonucleotide
  modified_base 80: mod_base = OTHER; note = 2'-O-methyl ribonucleotide
  modified_base 81: mod_base = OTHER; note = 2'-O-methyl ribonucleotide
  modified_base 83: mod_base = OTHER; note = 2'-O-methyl ribonucleotide
  modified_base 84: mod_base = OTHER; note = 2'-O-methyl ribonucleotide
  modified_base 85: mod_base = OTHER; note = 2'-O-methyl ribonucleotide
  modified_base 86: mod_base = OTHER; note = 2'-O-methyl ribonucleotide
  modified_base 87: mod_base = OTHER; note = 2'-O-methyl ribonucleotide
  modified_base 88: mod_base = OTHER; note = 2'-O-methyl ribonucleotide
  modified_base 89: mod_base = OTHER; note = 2'-O-methyl ribonucleotide
  modified_base 90: mod_base = OTHER; note = 2'-O-methyl ribonucleotide
  modified_base 91: mod_base = OTHER; note = 2'-O-methyl ribonucleotide
  modified_base 92: mod_base = OTHER; note = 2'-O-methyl ribonucleotide
  modified_base 93: mod_base = OTHER; note = 2'-O-methyl ribonucleotide
  modified_base 94: mod_base = OTHER; note = 2'-O-methyl ribonucleotide
  modified_base 95: mod_base = OTHER; note = 2'-O-methyl ribonucleotide
  modified_base 96: mod_base = OTHER; note = 2'-O-methyl ribonucleotide
  modified_base 97: mod_base = OTHER; note = 2'-O-methyl ribonucleotide
  modified_base 98: mod_base = OTHER; note = 2'-O-methyl ribonucleotide
  modified_base 99: mod_base = OTHER; note = 2'-O-methyl ribonucleotide
  modified_base 100: mod_base = OTHER; note = 2'-O-methyl ribonucleotide
  modified_base 1..3: mod_base = OTHER; note = phosphorothioate linkage
  modified_base 45..46: mod_base = OTHER; note = phosphorothioate linkage
  modified_base 64..65: mod_base = OTHER; note = phosphorothioate linkage
  modified_base 98..100: mod_base = OTHER; note = phosphorothioate linkage

SEQ ID NO: 2756 - RNA, 103 nt, synthetic construct; identical to SEQ ID NO: 1699
  source 1..103: mol_type = other RNA
  modified_base 1: mod_base = OTHER; note = 2'-O-methyl ribonucleotide
  modified_base 2: mod_base = OTHER; note = 2'-O-methyl ribonucleotide
  modified_base 3: mod_base = OTHER; note = 2'-O-methyl ribonucleotide
  modified_base 21: mod_base = OTHER; note = 2'-O-methyl ribonucleotide
  modified_base 28: mod_base = OTHER; note = 2'-O-methyl ribonucleotide
  modified_base 29: mod_base = OTHER; note = 2'-O-methyl ribonucleotide
  modified_base 30: mod_base = OTHER; note = 2'-O-methyl ribonucleotide
  modified_base 31: mod_base = OTHER; note = 2'-O-methyl ribonucleotide
  modified_base 32: mod_base = OTHER; note = 2'-O-methyl ribonucleotide
  modified_base 34: mod_base = OTHER; note = 2'-O-methyl ribonucleotide
  modified_base 35: mod_base = OTHER; note = 2'-O-methyl ribonucleotide
  modified_base 36: mod_base = OTHER; note = 2'-O-methyl ribonucleotide
  modified_base 37: mod_base = OTHER; note = 2'-O-methyl ribonucleotide
  modified_base 38: mod_base = OTHER; note = 2'-O-methyl ribonucleotide
  modified_base 39: mod_base = OTHER; note = 2'-O-methyl ribonucleotide
  modified_base 40: mod_base = OTHER; note = 2'-O-methyl ribonucleotide
  modified_base 41: mod_base = OTHER; note = 2'-O-methyl ribonucleotide
  modified_base 42: mod_base = OTHER; note = 2'-O-methyl ribonucleotide
  modified_base 46: mod_base = OTHER; note = 2'-O-methyl ribonucleotide
  modified_base 48: mod_base = OTHER; note = 2'-O-methyl ribonucleotide
  modified_base 50: mod_base = OTHER; note = 2'-O-methyl ribonucleotide
  modified_base 52: mod_base = OTHER; note = 2'-O-methyl ribonucleotide
  modified_base 53: mod_base = OTHER; note = 2'-O-methyl ribonucleotide
  modified_base 54: mod_base = OTHER; note = 2'-O-methyl ribonucleotide
  modified_base 55: mod_base = OTHER; note = 2'-O-methyl ribonucleotide
  modified_base 56: mod_base = OTHER; note = 2'-O-methyl ribonucleotide
  modified_base 57: mod_base = OTHER; note = 2'-O-methyl ribonucleotide
  modified_base 60: mod_base = OTHER; note = 2'-O-methyl ribonucleotide
  modified_base 61: mod_base = OTHER; note = 2'-O-methyl ribonucleotide
  modified_base 66: mod_base = OTHER; note = 2'-O-methyl ribonucleotide
  modified_base 67: mod_base = OTHER; note = 2'-O-methyl ribonucleotide
  modified_base 70: mod_base = OTHER; note = 2'-O-methyl ribonucleotide
  modified_base 71: mod_base = OTHER; note = 2'-O-methyl ribonucleotide
  modified_base 72: mod_base = OTHER; note = 2'-O-methyl ribonucleotide
  modified_base 74: mod_base = OTHER; note = 2'-O-methyl ribonucleotide
  modified_base 75: mod_base = OTHER; note = 2'-O-methyl ribonucleotide
  modified_base 76: mod_base = OTHER; note = 2'-O-methyl ribonucleotide
  modified_base 77: mod_base = OTHER; note = 2'-O-methyl ribonucleotide
  modified_base 78: mod_base = OTHER; note = 2'-O-methyl ribonucleotide
  modified_base 79: mod_base = OTHER; note = 2'-O-methyl ribonucleotide
  modified_base 80: mod_base = OTHER; note = 2'-O-methyl ribonucleotide
  modified_base 81: mod_base = OTHER; note = 2'-O-methyl ribonucleotide
  modified_base 83: mod_base = OTHER; note = 2'-O-methyl ribonucleotide
  modified_base 84: mod_base = OTHER; note = 2'-O-methyl ribonucleotide
  modified_base 85: mod_base = OTHER; note = 2'-O-methyl ribonucleotide
  modified_base 86: mod_base = OTHER; note = 2'-O-methyl ribonucleotide
  modified_base 87: mod_base = OTHER; note = 2'-O-methyl ribonucleotide
  modified_base 88: mod_base = OTHER; note = 2'-O-methyl ribonucleotide
  modified_base 89: mod_base = OTHER; note = 2'-O-methyl ribonucleotide
  modified_base 90: mod_base = OTHER; note = 2'-O-methyl ribonucleotide
  modified_base 91: mod_base = OTHER; note = 2'-O-methyl ribonucleotide
  modified_base 92: mod_base = OTHER; note = 2'-O-methyl ribonucleotide
  modified_base 93: mod_base = OTHER; note = 2'-O-methyl ribonucleotide
  modified_base 94: mod_base = OTHER; note = 2'-O-methyl ribonucleotide
  modified_base 95: mod_base = OTHER; note = 2'-O-methyl ribonucleotide
  modified_base 96: mod_base = OTHER; note = 2'-O-methyl ribonucleotide
  modified_base 97: mod_base = OTHER; note = 2'-O-methyl ribonucleotide
  modified_base 98: mod_base = OTHER; note = 2'-O-methyl ribonucleotide
  modified_base 99: mod_base = OTHER; note = 2'-O-methyl ribonucleotide
  modified_base 100: mod_base = OTHER; note = 2'-O-methyl ribonucleotide
  modified_base 1..3: mod_base = OTHER; note = phosphorothioate linkage
  modified_base 45..46: mod_base = OTHER; note = phosphorothioate linkage
  modified_base 64..65: mod_base = OTHER; note = phosphorothioate linkage
  modified_base 98..100: mod_base = OTHER; note = phosphorothioate linkage

SEQ ID NO: 2757 - RNA, 103 nt, synthetic construct; identical to SEQ ID NO: 1700
  source 1..103: mol_type = other RNA
  modified_base 1: mod_base = OTHER; note = 2'-O-methyl ribonucleotide
  modified_base 2: mod_base = OTHER; note = 2'-O-methyl ribonucleotide
  modified_base 3: mod_base = OTHER; note = 2'-O-methyl ribonucleotide
  modified_base 21: mod_base = OTHER; note = 2'-O-methyl ribonucleotide
  modified_base 28: mod_base = OTHER; note = 2'-O-methyl ribonucleotide
  modified_base 29: mod_base = OTHER; note = 2'-O-methyl ribonucleotide
  modified_base 30: mod_base = OTHER; note = 2'-O-methyl ribonucleotide
  modified_base 31: mod_base = OTHER; note = 2'-O-methyl ribonucleotide
  modified_base 32: mod_base = OTHER; note = 2'-O-methyl ribonucleotide
  modified_base 33: mod_base = OTHER; note = 2'-O-methyl ribonucleotide
  modified_base 34: mod_base = OTHER; note = 2'-O-methyl ribonucleotide
  modified_base 35: mod_base = OTHER; note = 2'-O-methyl ribonucleotide
  modified_base 36: mod_base = OTHER; note = 2'-O-methyl ribonucleotide
  modified_base 37: mod_base = OTHER; note = 2'-O-methyl ribonucleotide
  modified_base 38: mod_base = OTHER; note = 2'-O-methyl ribonucleotide
  modified_base 39: mod_base = OTHER; note = 2'-O-methyl ribonucleotide
  modified_base 40: mod_base = OTHER; note = 2'-O-methyl ribonucleotide
  modified_base 41: mod_base = OTHER; note = 2'-O-methyl ribonucleotide
  modified_base 42: mod_base = OTHER; note = 2'-O-methyl ribonucleotide
  modified_base 46: mod_base = OTHER; note = 2'-O-methyl ribonucleotide
  modified_base 48: mod_base = OTHER; note = 2'-O-methyl ribonucleotide
  modified_base 50: mod_base = OTHER; note = 2'-O-methyl ribonucleotide
  modified_base 52: mod_base = OTHER; note = 2'-O-methyl ribonucleotide
  modified_base 53: mod_base = OTHER; note = 2'-O-methyl ribonucleotide
  modified_base 54: mod_base = OTHER; note = 2'-O-methyl ribonucleotide
  modified_base 57: mod_base = OTHER; note = 2'-O-methyl ribonucleotide
  modified_base 61: mod_base = OTHER; note = 2'-O-methyl ribonucleotide
  modified_base 66: mod_base = OTHER; note = 2'-O-methyl ribonucleotide
  modified_base 67: mod_base = OTHER; note = 2'-O-methyl ribonucleotide
  modified_base 70: mod_base = OTHER; note = 2'-O-methyl ribonucleotide
  modified_base 71: mod_base = OTHER; note = 2'-O-methyl ribonucleotide
  modified_base 72: mod_base = OTHER; note = 2'-O-methyl ribonucleotide
  modified_base 74: mod_base = OTHER; note = 2'-O-methyl ribonucleotide
  modified_base 75: mod_base = OTHER; note = 2'-O-methyl ribonucleotide
  modified_base 76: mod_base = OTHER; note = 2'-O-methyl ribonucleotide
  modified_base 77: mod_base = OTHER; note = 2'-O-methyl ribonucleotide
  modified_base 78: mod_base = OTHER; note = 2'-O-methyl ribonucleotide
  modified_base 79: mod_base = OTHER; note = 2'-O-methyl ribonucleotide
  modified_base 80: mod_base = OTHER; note = 2'-O-methyl ribonucleotide
  modified_base 82: mod_base = OTHER; note = 2'-O-methyl ribonucleotide
  modified_base 83: mod_base = OTHER; note = 2'-O-methyl ribonucleotide
  modified_base 84: mod_base = OTHER; note = 2'-O-methyl ribonucleotide
  modified_base 85: mod_base = OTHER; note = 2'-O-methyl ribonucleotide
  modified_base 86: mod_base = OTHER; note = 2'-O-methyl ribonucleotide
  modified_base 87: mod_base = OTHER; note = 2'-O-methyl ribonucleotide
  modified_base 89: mod_base = OTHER; note = 2'-O-methyl ribonucleotide
  modified_base 92: mod_base = OTHER; note = 2'-O-methyl ribonucleotide
  modified_base 93: mod_base = OTHER; note = 2'-O-methyl ribonucleotide
  modified_base 94: mod_base = OTHER; note = 2'-O-methyl ribonucleotide
  modified_base 95: mod_base = OTHER; note = 2'-O-methyl ribonucleotide
  modified_base 96: mod_base = OTHER; note = 2'-O-methyl ribonucleotide
  modified_base 97: mod_base = OTHER; note = 2'-O-methyl ribonucleotide
  modified_base 98: mod_base = OTHER; note = 2'-O-methyl ribonucleotide
  modified_base 99: mod_base = OTHER; note = 2'-O-methyl ribonucleotide
  modified_base 100: mod_base = OTHER; note = 2'-O-methyl ribonucleotide
  modified_base 1..3: mod_base = OTHER; note = phosphorothioate linkage
  modified_base 45..46: mod_base = OTHER; note = phosphorothioate linkage
  modified_base 64..65: mod_base = OTHER; note = phosphorothioate linkage
  modified_base 98..100: mod_base = OTHER; note = phosphorothioate linkage

SEQ ID NO: 2758 - RNA, 103 nt, synthetic construct; identical to SEQ ID NO: 1700
  source 1..103: mol_type = other RNA
  modified_base 1: mod_base = OTHER; note = 2'-O-methyl ribonucleotide
  modified_base 2: mod_base = OTHER; note = 2'-O-methyl ribonucleotide
  modified_base 3: mod_base = OTHER; note = 2'-O-methyl ribonucleotide
  modified_base 21: mod_base = OTHER; note = 2'-O-methyl ribonucleotide
  modified_base 28: mod_base = OTHER; note = 2'-O-methyl ribonucleotide
  modified_base 29: mod_base = OTHER; note = 2'-O-methyl ribonucleotide
  modified_base 30: mod_base = OTHER; note = 2'-O-methyl ribonucleotide
  modified_base 31: mod_base = OTHER; note = 2'-O-methyl ribonucleotide
  modified_base 32: mod_base = OTHER; note = 2'-O-methyl ribonucleotide
  modified_base 33: mod_base = OTHER; note = 2'-O-methyl ribonucleotide
  modified_base 34: mod_base = OTHER; note = 2'-O-methyl ribonucleotide
  modified_base 35: mod_base = OTHER; note = 2'-O-methyl ribonucleotide
  modified_base 36: mod_base = OTHER; note = 2'-O-methyl ribonucleotide
  modified_base 37: mod_base = OTHER; note = 2'-O-methyl ribonucleotide
  modified_base 38: mod_base = OTHER; note = 2'-O-methyl ribonucleotide
  modified_base 39: mod_base = OTHER; note = 2'-O-methyl ribonucleotide
  modified_base 40: mod_base = OTHER; note = 2'-O-methyl ribonucleotide
  modified_base 41: mod_base = OTHER; note = 2'-O-methyl ribonucleotide
  modified_base 42: mod_base = OTHER; note = 2'-O-methyl ribonucleotide
  modified_base 46: mod_base = OTHER; note = 2'-O-methyl ribonucleotide
  modified_base 48: mod_base = OTHER; note = 2'-O-methyl ribonucleotide
  modified_base 50: mod_base = OTHER; note = 2'-O-methyl ribonucleotide
  modified_base 52: mod_base = OTHER; note = 2'-O-methyl ribonucleotide
  modified_base 53: mod_base = OTHER; note = 2'-O-methyl ribonucleotide
  modified_base 54: mod_base = OTHER; note = 2'-O-methyl ribonucleotide
  modified_base 55: mod_base = OTHER; note = 2'-O-methyl ribonucleotide
  modified_base 56: mod_base = OTHER; note = 2'-O-methyl ribonucleotide
  modified_base 57: mod_base = OTHER; note = 2'-O-methyl ribonucleotide
  modified_base 60: mod_base = OTHER; note = 2'-O-methyl ribonucleotide
  modified_base 61: mod_base = OTHER; note = 2'-O-methyl ribonucleotide
  modified_base 66: mod_base = OTHER; note = 2'-O-methyl ribonucleotide
  modified_base 67: mod_base = OTHER; note = 2'-O-methyl ribonucleotide
  modified_base 70: mod_base = OTHER; note = 2'-O-methyl ribonucleotide
  modified_base 71: mod_base = OTHER; note = 2'-O-methyl ribonucleotide
  modified_base 72: mod_base = OTHER; note = 2'-O-methyl ribonucleotide
  modified_base 74: mod_base = OTHER; note = 2'-O-methyl ribonucleotide
  modified_base 75: mod_base = OTHER; note = 2'-O-methyl ribonucleotide
  modified_base 76: mod_base = OTHER; note = 2'-O-methyl ribonucleotide
  modified_base 77: mod_base = OTHER; note = 2'-O-methyl ribonucleotide
  modified_base 78: mod_base = OTHER; note = 2'-O-methyl ribonucleotide
  modified_base 79: mod_base = OTHER; note = 2'-O-methyl ribonucleotide
  modified_base 80: mod_base = OTHER; note = 2'-O-methyl ribonucleotide
  modified_base 82: mod_base = OTHER; note = 2'-O-methyl ribonucleotide
  modified_base 83: mod_base = OTHER; note = 2'-O-methyl ribonucleotide
  modified_base 84: mod_base = OTHER; note = 2'-O-methyl ribonucleotide
  modified_base 85: mod_base = OTHER; note = 2'-O-methyl ribonucleotide
  modified_base 86: mod_base = OTHER; note = 2'-O-methyl ribonucleotide
  modified_base 87: mod_base = OTHER; note = 2'-O-methyl ribonucleotide
  modified_base 89: mod_base = OTHER; note = 2'-O-methyl ribonucleotide
  modified_base 92: mod_base = OTHER; note = 2'-O-methyl ribonucleotide
  modified_base 93: mod_base = OTHER; note = 2'-O-methyl ribonucleotide
  modified_base 94: mod_base = OTHER; note = 2'-O-methyl ribonucleotide
  modified_base 95: mod_base = OTHER; note = 2'-O-methyl ribonucleotide
  modified_base 96: mod_base = OTHER; note = 2'-O-methyl ribonucleotide
  modified_base 97: mod_base = OTHER; note = 2'-O-methyl ribonucleotide
  modified_base 98: mod_base = OTHER; note = 2'-O-methyl ribonucleotide
  modified_base 99: mod_base = OTHER; note = 2'-O-methyl ribonucleotide
  modified_base 100: mod_base = OTHER; note = 2'-O-methyl ribonucleotide
  modified_base 1..3: mod_base = OTHER; note = phosphorothioate linkage
  modified_base 45..46: mod_base = OTHER; note = phosphorothioate linkage
  modified_base 64..65: mod_base = OTHER; note = phosphorothioate linkage
  modified_base 98..100: mod_base = OTHER; note = phosphorothioate linkage

SEQ ID NO: 2759 - RNA, 103 nt, synthetic construct; identical to SEQ ID NO: 1700
  source 1..103: mol_type = other RNA
  modified_base 1: mod_base = OTHER; note = 2'-O-methyl ribonucleotide
  modified_base 2: mod_base = OTHER; note = 2'-O-methyl ribonucleotide
  modified_base 3: mod_base = OTHER; note = 2'-O-methyl ribonucleotide
  modified_base 21: mod_base = OTHER; note = 2'-O-methyl ribonucleotide
  modified_base 28: mod_base = OTHER; note = 2'-O-methyl ribonucleotide
  modified_base 29: mod_base = OTHER; note = 2'-O-methyl ribonucleotide
  modified_base 30: mod_base = OTHER; note = 2'-O-methyl ribonucleotide
  modified_base 31: mod_base = OTHER; note = 2'-O-methyl ribonucleotide
  modified_base 32: mod_base = OTHER; note = 2'-O-methyl ribonucleotide
  modified_base 33: mod_base = OTHER; note = 2'-O-methyl ribonucleotide
  modified_base 34: mod_base = OTHER; note = 2'-O-methyl ribonucleotide
  modified_base 35: mod_base = OTHER; note = 2'-O-methyl ribonucleotide
  modified_base 36: mod_base = OTHER; note = 2'-O-methyl ribonucleotide
  modified_base 37: mod_base = OTHER; note = 2'-O-methyl ribonucleotide
  modified_base 38: mod_base = OTHER; note = 2'-O-methyl ribonucleotide
  modified_base 39: mod_base = OTHER; note = 2'-O-methyl ribonucleotide
  modified_base 40: mod_base = OTHER; note = 2'-O-methyl ribonucleotide
  modified_base 41: mod_base = OTHER; note = 2'-O-methyl ribonucleotide
  modified_base 42: mod_base = OTHER; note = 2'-O-methyl ribonucleotide
  modified_base 46: mod_base = OTHER; note = 2'-O-methyl ribonucleotide
  modified_base 48: mod_base = OTHER; note = 2'-O-methyl ribonucleotide
  modified_base 50: mod_base = OTHER; note = 2'-O-methyl ribonucleotide
  modified_base 52: mod_base = OTHER; note = 2'-O-methyl ribonucleotide
  modified_base 53: mod_base = OTHER; note = 2'-O-methyl ribonucleotide
  modified_base 54: mod_base = OTHER; note = 2'-O-methyl ribonucleotide
  modified_base 57: mod_base = OTHER; note = 2'-O-methyl ribonucleotide
  modified_base 61: mod_base = OTHER; note = 2'-O-methyl ribonucleotide
  modified_base 66: mod_base = OTHER; note = 2'-O-methyl ribonucleotide
  modified_base 67: mod_base = OTHER; note = 2'-O-methyl ribonucleotide
  modified_base 70: mod_base = OTHER; note = 2'-O-methyl ribonucleotide
  modified_base 71: mod_base = OTHER; note = 2'-O-methyl ribonucleotide
  modified_base 72: mod_base = OTHER; note = 2'-O-methyl ribonucleotide
  modified_base 73: mod_base = OTHER; note = 2'-O-methyl ribonucleotide
  modified_base 74: mod_base = OTHER; note = 2'-O-methyl ribonucleotide
  modified_base 75: mod_base = OTHER; note = 2'-O-methyl ribonucleotide
  modified_base 76: mod_base = OTHER; note = 2'-O-methyl ribonucleotide
  modified_base 77: mod_base = OTHER; note = 2'-O-methyl ribonucleotide
  modified_base 78: mod_base = OTHER; note = 2'-O-methyl ribonucleotide
  modified_base 79: mod_base = OTHER; note = 2'-O-methyl ribonucleotide
  modified_base 80: mod_base = OTHER; note = 2'-O-methyl ribonucleotide
  modified_base 82: mod_base = OTHER; note = 2'-O-methyl ribonucleotide
  modified_base 83: mod_base = OTHER; note = 2'-O-methyl ribonucleotide
  modified_base 84: mod_base = OTHER; note = 2'-O-methyl ribonucleotide
  modified_base 85: mod_base = OTHER; note = 2'-O-methyl ribonucleotide
  modified_base 86: mod_base = OTHER; note = 2'-O-methyl ribonucleotide
  modified_base 87: mod_base = OTHER; note = 2'-O-methyl ribonucleotide
  modified_base 89: mod_base = OTHER; note = 2'-O-methyl ribonucleotide
  modified_base 92: mod_base = OTHER; note = 2'-O-methyl ribonucleotide
  modified_base 93: mod_base = OTHER; note = 2'-O-methyl ribonucleotide
  modified_base 94: mod_base = OTHER; note = 2'-O-methyl ribonucleotide
  modified_base 95: mod_base = OTHER; note = 2'-O-methyl ribonucleotide
  modified_base 96: mod_base = OTHER; note = 2'-O-methyl ribonucleotide
  modified_base 97: mod_base = OTHER; note = 2'-O-methyl ribonucleotide
  modified_base 98: mod_base = OTHER; note = 2'-O-methyl ribonucleotide
  modified_base 99: mod_base = OTHER; note = 2'-O-methyl ribonucleotide
  modified_base 100: mod_base = OTHER; note = 2'-O-methyl ribonucleotide
  modified_base 1..3: mod_base = OTHER; note = phosphorothioate linkage
  modified_base 45..46: mod_base = OTHER; note = phosphorothioate linkage
  modified_base 64..65: mod_base = OTHER; note = phosphorothioate linkage
  modified_base 98..100: mod_base = OTHER; note = phosphorothioate linkage

SEQ ID NO: 2760 - RNA, 103 nt, synthetic construct; identical to SEQ ID NO: 1700
  source 1..103: mol_type = other RNA
  modified_base 1: mod_base = OTHER; note = 2'-O-methyl ribonucleotide
  modified_base 2: mod_base = OTHER; note = 2'-O-methyl ribonucleotide
  modified_base 3: mod_base = OTHER; note = 2'-O-methyl ribonucleotide
  modified_base 21: mod_base = OTHER; note = 2'-O-methyl ribonucleotide
  modified_base 28: mod_base = OTHER; note = 2'-O-methyl ribonucleotide
  modified_base 29: mod_base = OTHER; note = 2'-O-methyl ribonucleotide
  modified_base 30: mod_base = OTHER; note = 2'-O-methyl ribonucleotide
  modified_base 31: mod_base = OTHER; note = 2'-O-methyl ribonucleotide
  modified_base 32: mod_base = OTHER; note = 2'-O-methyl ribonucleotide
  modified_base 34: mod_base = OTHER; note = 2'-O-methyl ribonucleotide
  modified_base 35: mod_base = OTHER; note = 2'-O-methyl ribonucleotide
  modified_base 36: mod_base = OTHER; note = 2'-O-methyl ribonucleotide
  modified_base 37: mod_base = OTHER; note = 2'-O-methyl ribonucleotide
  modified_base 38: mod_base = OTHER; note = 2'-O-methyl ribonucleotide
  modified_base 39: mod_base = OTHER; note = 2'-O-methyl ribonucleotide
  modified_base 40: mod_base = OTHER; note = 2'-O-methyl ribonucleotide
  modified_base 41: mod_base = OTHER; note = 2'-O-methyl ribonucleotide
  modified_base 42: mod_base = OTHER; note = 2'-O-methyl ribonucleotide
  modified_base 46: mod_base = OTHER; note = 2'-O-methyl ribonucleotide
  modified_base 48: mod_base = OTHER; note = 2'-O-methyl ribonucleotide
  modified_base 50: mod_base = OTHER; note = 2'-O-methyl ribonucleotide
  modified_base 52: mod_base = OTHER; note = 2'-O-methyl ribonucleotide
  modified_base 53: mod_base = OTHER; note = 2'-O-methyl ribonucleotide
  modified_base 54: mod_base = OTHER; note = 2'-O-methyl ribonucleotide
  modified_base 57: mod_base = OTHER; note = 2'-O-methyl ribonucleotide
  modified_base 61: mod_base = OTHER; note = 2'-O-methyl ribonucleotide
  modified_base 66: mod_base = OTHER; note = 2'-O-methyl ribonucleotide
  modified_base 67: mod_base = OTHER; note = 2'-O-methyl ribonucleotide
  modified_base 70: mod_base = OTHER; note = 2'-O-methyl ribonucleotide
  modified_base 71: mod_base = OTHER; note = 2'-O-methyl ribonucleotide
  modified_base 72: mod_base = OTHER; note = 2'-O-methyl ribonucleotide
  modified_base 73: mod_base = OTHER; note = 2'-O-methyl ribonucleotide
  modified_base 74: mod_base = OTHER; note = 2'-O-methyl ribonucleotide
  modified_base 75: mod_base = OTHER; note = 2'-O-methyl ribonucleotide
  modified_base 76: mod_base = OTHER; note = 2'-O-methyl ribonucleotide
  modified_base 77: mod_base = OTHER; note = 2'-O-methyl ribonucleotide
  modified_base 78: mod_base = OTHER; note = 2'-O-methyl ribonucleotide
  modified_base 79: mod_base = OTHER; note = 2'-O-methyl ribonucleotide
  modified_base 80: mod_base = OTHER; note = 2'-O-methyl ribonucleotide
  modified_base 82: mod_base = OTHER; note = 2'-O-methyl ribonucleotide
  modified_base 83: mod_base = OTHER; note = 2'-O-methyl ribonucleotide
  modified_base 84: mod_base = OTHER; note = 2'-O-methyl ribonucleotide
  modified_base 85: mod_base = OTHER; note = 2'-O-methyl ribonucleotide
  modified_base 86: mod_base = OTHER; note = 2'-O-methyl ribonucleotide
  modified_base 87: mod_base = OTHER; note = 2'-O-methyl ribonucleotide
  modified_base 89: mod_base = OTHER; note = 2'-O-methyl ribonucleotide
  modified_base 92: mod_base = OTHER; note = 2'-O-methyl ribonucleotide
  modified_base 93: mod_base = OTHER; note = 2'-O-methyl ribonucleotide
  modified_base 94: mod_base = OTHER; note = 2'-O-methyl ribonucleotide
  modified_base 95: mod_base = OTHER; note = 2'-O-methyl ribonucleotide
  modified_base 96: mod_base = OTHER; note = 2'-O-methyl ribonucleotide
  modified_base 97: mod_base = OTHER; note = 2'-O-methyl ribonucleotide
  modified_base 98: mod_base = OTHER; note = 2'-O-methyl ribonucleotide
  modified_base 99: mod_base = OTHER; note = 2'-O-methyl ribonucleotide
  modified_base 100: mod_base = OTHER; note = 2'-O-methyl ribonucleotide
  modified_base 1..3: mod_base = OTHER; note = phosphorothioate linkage
  modified_base 45..46: mod_base = OTHER; note = phosphorothioate linkage
  modified_base 64..65: mod_base = OTHER; note = phosphorothioate linkage
  modified_base 98..100: mod_base = OTHER; note = phosphorothioate linkage

SEQ ID NO: 2761 - RNA, 103 nt, synthetic construct; identical to SEQ ID NO: 1700
  source 1..103: mol_type = other RNA
  modified_base 1: mod_base = OTHER; note = 2'-O-methyl ribonucleotide
  modified_base 2: mod_base = OTHER; note = 2'-O-methyl ribonucleotide
  modified_base 3: mod_base = OTHER; note = 2'-O-methyl ribonucleotide
  modified_base 21: mod_base = OTHER; note = 2'-O-methyl ribonucleotide
  modified_base 28: mod_base = OTHER; note = 2'-O-methyl ribonucleotide
  modified_base 29: mod_base = OTHER; note = 2'-O-methyl ribonucleotide
  modified_base 30: mod_base = OTHER; note = 2'-O-methyl ribonucleotide
  modified_base 31: mod_base = OTHER; note = 2'-O-methyl ribonucleotide
  modified_base 32: mod_base = OTHER; note = 2'-O-methyl ribonucleotide
  modified_base 34: mod_base = OTHER; note = 2'-O-methyl ribonucleotide
  modified_base 35: mod_base = OTHER; note = 2'-O-methyl ribonucleotide
  modified_base 36: mod_base = OTHER; note = 2'-O-methyl ribonucleotide
  modified_base 37: mod_base = OTHER; note = 2'-O-methyl ribonucleotide
  modified_base 38: mod_base = OTHER; note = 2'-O-methyl ribonucleotide
  modified_base 39: mod_base = OTHER; note = 2'-O-methyl ribonucleotide
  modified_base 40: mod_base = OTHER; note = 2'-O-methyl ribonucleotide
  modified_base 41: mod_base = OTHER; note = 2'-O-methyl ribonucleotide
  modified_base 42: mod_base = OTHER; note = 2'-O-methyl ribonucleotide
  modified_base 46: mod_base = OTHER; note = 2'-O-methyl ribonucleotide
  modified_base 48: mod_base = OTHER; note = 2'-O-methyl ribonucleotide
  modified_base 50: mod_base = OTHER; note = 2'-O-methyl ribonucleotide
  modified_base 52: mod_base = OTHER; note = 2'-O-methyl ribonucleotide
  modified_base 53: mod_base = OTHER; note = 2'-O-methyl ribonucleotide
  modified_base 54: mod_base = OTHER; note = 2'-O-methyl ribonucleotide
  modified_base 57: mod_base = OTHER; note = 2'-O-methyl ribonucleotide
  modified_base 61: mod_base = OTHER; note = 2'-O-methyl ribonucleotide
  modified_base 66: mod_base = OTHER; note = 2'-O-methyl ribonucleotide
  modified_base 67: mod_base = OTHER; note = 2'-O-methyl ribonucleotide
  modified_base 70: mod_base = OTHER; note = 2'-O-methyl ribonucleotide
  modified_base 71: mod_base = OTHER; note = 2'-O-methyl ribonucleotide
  modified_base 72: mod_base = OTHER; note = 2'-O-methyl ribonucleotide
  modified_base 73: mod_base = OTHER; note = 2'-O-methyl ribonucleotide
  modified_base 74: mod_base = OTHER; note = 2'-O-methyl ribonucleotide
  modified_base 75: mod_base = OTHER; note = 2'-O-methyl ribonucleotide
  modified_base 76: mod_base = OTHER; note = 2'-O-methyl ribonucleotide
  modified_base 77: mod_base = OTHER; note = 2'-O-methyl ribonucleotide
  modified_base 78: mod_base = OTHER; note = 2'-O-methyl ribonucleotide
  modified_base 79: mod_base = OTHER; note = 2'-O-methyl ribonucleotide
  modified_base 80: mod_base = OTHER; note = 2'-O-methyl ribonucleotide
  modified_base 82: mod_base = OTHER; note = 2'-O-methyl ribonucleotide
  modified_base 83: mod_base = OTHER; note = 2'-O-methyl ribonucleotide
  modified_base 84: mod_base = OTHER; note = 2'-O-methyl ribonucleotide
  modified_base 85: mod_base = OTHER; note = 2'-O-methyl ribonucleotide
  modified_base 86: mod_base = OTHER; note = 2'-O-methyl ribonucleotide
  modified_base 87: mod_base = OTHER; note = 2'-O-methyl ribonucleotide
  modified_base 89: mod_base = OTHER; note = 2'-O-methyl ribonucleotide
  modified_base 91: mod_base = OTHER; note = 2'-O-methyl ribonucleotide
  modified_base 92: mod_base = OTHER; note = 2'-O-methyl ribonucleotide
  modified_base 93: mod_base = OTHER; note = 2'-O-methyl ribonucleotide
  modified_base 94: mod_base = OTHER; note = 2'-O-methyl ribonucleotide
  modified_base 95: mod_base = OTHER; note = 2'-O-methyl ribonucleotide
  modified_base 96: mod_base = OTHER; note = 2'-O-methyl ribonucleotide
  modified_base 97: mod_base = OTHER; note = 2'-O-methyl ribonucleotide
  modified_base 98: mod_base = OTHER; note = 2'-O-methyl ribonucleotide
  modified_base 99: mod_base = OTHER; note = 2'-O-methyl ribonucleotide
  modified_base 100: mod_base = OTHER; note = 2'-O-methyl ribonucleotide
  modified_base 1..3: mod_base = OTHER; note = phosphorothioate linkage
  modified_base 45..46: mod_base = OTHER; note = phosphorothioate linkage
  modified_base 64..65: mod_base = OTHER; note = phosphorothioate linkage
  modified_base 98..100: mod_base = OTHER; note = phosphorothioate linkage

SEQ ID NO: 2762 - RNA, 103 nt, synthetic construct; identical to SEQ ID NO: 1700
  source 1..103: mol_type = other RNA
  modified_base 1: mod_base = OTHER; note = 2'-O-methyl ribonucleotide
  modified_base 2: mod_base = OTHER; note = 2'-O-methyl ribonucleotide
  modified_base 3: mod_base = OTHER; note = 2'-O-methyl ribonucleotide
  modified_base 21: mod_base = OTHER; note = 2'-O-methyl ribonucleotide
  modified_base 28: mod_base = OTHER; note = 2'-O-methyl ribonucleotide
  modified_base 29: mod_base = OTHER; note = 2'-O-methyl ribonucleotide
  modified_base 30: mod_base = OTHER; note = 2'-O-methyl ribonucleotide
  modified_base 31: mod_base = OTHER; note = 2'-O-methyl ribonucleotide
  modified_base 32: mod_base = OTHER; note = 2'-O-methyl ribonucleotide
  modified_base 34: mod_base = OTHER; note = 2'-O-methyl ribonucleotide
  modified_base 35: mod_base = OTHER; note = 2'-O-methyl ribonucleotide
  modified_base 36: mod_base = OTHER; note = 2'-O-methyl ribonucleotide
  modified_base 37: mod_base = OTHER; note = 2'-O-methyl ribonucleotide
  modified_base 38: mod_base = OTHER; note = 2'-O-methyl ribonucleotide
  modified_base 39: mod_base = OTHER; note = 2'-O-methyl ribonucleotide
  modified_base 40: mod_base = OTHER; note = 2'-O-methyl ribonucleotide
  modified_base 41: mod_base = OTHER; note = 2'-O-methyl ribonucleotide
  modified_base 42: mod_base = OTHER; note = 2'-O-methyl ribonucleotide
  modified_base 46: mod_base = OTHER; note = 2'-O-methyl ribonucleotide
  modified_base 48: mod_base = OTHER; note = 2'-O-methyl ribonucleotide
  modified_base 50: mod_base = OTHER; note = 2'-O-methyl ribonucleotide
  modified_base 52: mod_base = OTHER; note = 2'-O-methyl ribonucleotide
  modified_base 53: mod_base = OTHER; note = 2'-O-methyl ribonucleotide
  modified_base 54: mod_base = OTHER; note = 2'-O-methyl ribonucleotide
  modified_base 55: mod_base = OTHER; note = 2'-O-methyl ribonucleotide
  modified_base 56: mod_base = OTHER; note = 2'-O-methyl ribonucleotide
  modified_base 57: mod_base = OTHER; note = 2'-O-methyl ribonucleotide
  modified_base 60: mod_base = OTHER; note = 2'-O-methyl ribonucleotide
  modified_base 61: mod_base = OTHER; note = 2'-O-methyl ribonucleotide
  modified_base 66: mod_base = OTHER; note = 2'-O-methyl ribonucleotide
  modified_base 67: mod_base = OTHER; note = 2'-O-methyl ribonucleotide
  modified_base 70: mod_base = OTHER; note = 2'-O-methyl ribonucleotide
  modified_base 71: mod_base = OTHER; note = 2'-O-methyl ribonucleotide
  modified_base 72: mod_base = OTHER; note = 2'-O-methyl ribonucleotide
  modified_base 74: mod_base = OTHER; note = 2'-O-methyl ribonucleotide
  modified_base 75: mod_base = OTHER; note = 2'-O-methyl ribonucleotide
  modified_base 76: mod_base = OTHER; note = 2'-O-methyl ribonucleotide
  modified_base 77: mod_base = OTHER; note = 2'-O-methyl ribonucleotide
  modified_base 78: mod_base = OTHER; note = 2'-O-methyl ribonucleotide
  modified_base 79: mod_base = OTHER; note = 2'-O-methyl ribonucleotide
  modified_base 80: mod_base = OTHER; note = 2'-O-methyl ribonucleotide
  modified_base 82: mod_base = OTHER; note = 2'-O-methyl ribonucleotide
  modified_base 83: mod_base = OTHER; note = 2'-O-methyl ribonucleotide
  modified_base 84: mod_base = OTHER; note = 2'-O-methyl ribonucleotide
  modified_base 85: mod_base = OTHER; note = 2'-O-methyl ribonucleotide
  modified_base 86: mod_base = OTHER; note = 2'-O-methyl ribonucleotide
  modified_base 87: mod_base = OTHER; note = 2'-O-methyl ribonucleotide
  modified_base 89: mod_base = OTHER; note = 2'-O-methyl ribonucleotide
  modified_base 92: mod_base = OTHER; note = 2'-O-methyl ribonucleotide
  modified_base 93: mod_base = OTHER; note = 2'-O-methyl ribonucleotide
  modified_base 94: mod_base = OTHER; note = 2'-O-methyl ribonucleotide
  modified_base 95: mod_base = OTHER; note = 2'-O-methyl ribonucleotide
  modified_base 96: mod_base = OTHER; note = 2'-O-methyl ribonucleotide
  modified_base 97: mod_base = OTHER; note = 2'-O-methyl ribonucleotide
  modified_base 98: mod_base = OTHER; note = 2'-O-methyl ribonucleotide
  modified_base 99: mod_base = OTHER; note = 2'-O-methyl ribonucleotide
  modified_base 100: mod_base = OTHER; note = 2'-O-methyl ribonucleotide
  modified_base 1..3: mod_base = OTHER; note = phosphorothioate linkage
  modified_base 45..46: mod_base = OTHER; note = phosphorothioate linkage
  modified_base 64..65: mod_base = OTHER; note = phosphorothioate linkage
  modified_base 98..100: mod_base = OTHER; note = phosphorothioate linkage

SEQ ID NO: 2763 - RNA, 103 nt, synthetic construct; identical to SEQ ID NO: 1643
  source 1..103: mol_type = other RNA
  modified_base 1: mod_base = OTHER; note = 2'-O-methyl ribonucleotide
  modified_base 2: mod_base = OTHER; note = 2'-O-methyl ribonucleotide
  modified_base 3: mod_base = OTHER; note = 2'-O-methyl ribonucleotide
  modified_base 21: mod_base = OTHER; note = 2'-O-methyl ribonucleotide
  modified_base 28: mod_base = OTHER; note = 2'-O-methyl ribonucleotide
  modified_base 29: mod_base = OTHER; note = 2'-O-methyl ribonucleotide
  modified_base 30: mod_base = OTHER; note = 2'-O-methyl ribonucleotide
  modified_base 31: mod_base = OTHER; note = 2'-O-methyl ribonucleotide
  modified_base 32: mod_base = OTHER; note = 2'-O-methyl ribonucleotide
  modified_base 33: mod_base = OTHER; note = 2'-O-methyl ribonucleotide
  modified_base 34: mod_base = OTHER; note = 2'-O-methyl ribonucleotide
  modified_base 35: mod_base = OTHER; note = 2'-O-methyl ribonucleotide
  modified_base 36: mod_base = OTHER; note = 2'-O-methyl ribonucleotide
  modified_base 37: mod_base = OTHER; note = 2'-O-methyl ribonucleotide
  modified_base 38: mod_base = OTHER; note = 2'-O-methyl ribonucleotide
  modified_base 39: mod_base = OTHER; note = 2'-O-methyl ribonucleotide
  modified_base 40: mod_base = OTHER; note = 2'-O-methyl ribonucleotide
  modified_base 41: mod_base = OTHER; note = 2'-O-methyl ribonucleotide
  modified_base 42: mod_base = OTHER; note = 2'-O-methyl ribonucleotide
  modified_base 46: mod_base = OTHER; note = 2'-O-methyl ribonucleotide
  modified_base 48: mod_base = OTHER; note = 2'-O-methyl ribonucleotide
  modified_base 50: mod_base = OTHER; note = 2'-O-methyl ribonucleotide
  modified_base 52: mod_base = OTHER; note = 2'-O-methyl ribonucleotide
  modified_base 53: mod_base = OTHER; note = 2'-O-methyl ribonucleotide
  modified_base 54: mod_base = OTHER; note = 2'-O-methyl ribonucleotide
  modified_base 55: mod_base = OTHER; note = 2'-O-methyl ribonucleotide
  modified_base 56: mod_base = OTHER; note = 2'-O-methyl ribonucleotide
  modified_base 57: mod_base = OTHER; note = 2'-O-methyl ribonucleotide
  modified_base 60: mod_base = OTHER; note = 2'-O-methyl ribonucleotide
  modified_base 61: mod_base = OTHER; note = 2'-O-methyl ribonucleotide
  modified_base 66: mod_base = OTHER; note = 2'-O-methyl ribonucleotide
  modified_base 67: mod_base = OTHER; note = 2'-O-methyl ribonucleotide
  modified_base 70: mod_base = OTHER; note = 2'-O-methyl ribonucleotide
  modified_base 71: mod_base = OTHER; note = 2'-O-methyl ribonucleotide
  modified_base 72: mod_base = OTHER; note = 2'-O-methyl ribonucleotide
  modified_base 73: mod_base = OTHER; note = 2'-O-methyl ribonucleotide
  modified_base 74: mod_base = OTHER; note = 2'-O-methyl ribonucleotide
  modified_base 75: mod_base = OTHER; note = 2'-O-methyl ribonucleotide
  modified_base 76: mod_base = OTHER; note = 2'-O-methyl ribonucleotide
  modified_base 77: mod_base = OTHER; note = 2'-O-methyl ribonucleotide
  modified_base 78: mod_base = OTHER; note = 2'-O-methyl ribonucleotide
  modified_base 79: mod_base = OTHER; note = 2'-O-methyl ribonucleotide
  modified_base 80: mod_base = OTHER; note = 2'-O-methyl ribonucleotide
  modified_base 81: mod_base = OTHER; note = 2'-O-methyl ribonucleotide
  modified_base 83: mod_base = OTHER; note = 2'-O-methyl ribonucleotide
  modified_base 84: mod_base = OTHER; note = 2'-O-methyl ribonucleotide
  modified_base 85: mod_base = OTHER; note = 2'-O-methyl ribonucleotide
  modified_base 86: mod_base = OTHER; note = 2'-O-methyl ribonucleotide
  modified_base 87: mod_base = OTHER; note = 2'-O-methyl ribonucleotide
  modified_base 88: mod_base = OTHER; note = 2'-O-methyl ribonucleotide
  modified_base 89: mod_base = OTHER; note = 2'-O-methyl ribonucleotide
  modified_base 90: mod_base = OTHER; note = 2'-O-methyl ribonucleotide
  modified_base 91: mod_base = OTHER; note = 2'-O-methyl ribonucleotide
  modified_base 92: mod_base = OTHER; note = 2'-O-methyl ribonucleotide
  modified_base 93: mod_base = OTHER; note = 2'-O-methyl ribonucleotide
  modified_base 94: mod_base = OTHER; note = 2'-O-methyl ribonucleotide
  modified_base 95: mod_base = OTHER; note = 2'-O-methyl ribonucleotide
  modified_base 96: mod_base = OTHER; note = 2'-O-methyl ribonucleotide
  modified_base 97: mod_base = OTHER; note = 2'-O-methyl ribonucleotide
  modified_base 98: mod_base = OTHER; note = 2'-O-methyl ribonucleotide
  modified_base 99: mod_base = OTHER; note = 2'-O-methyl ribonucleotide
  modified_base 100: mod_base = OTHER; note = 2'-O-methyl ribonucleotide
  modified_base 1..3: mod_base = OTHER; note = phosphorothioate linkage
  modified_base 25..26: mod_base = OTHER; note = phosphorothioate linkage
  modified_base 45..46: mod_base = OTHER; note = phosphorothioate linkage
  modified_base 98..100: mod_base = OTHER; note = phosphorothioate linkage

SEQ ID NO: 2764 - RNA, 103 nt, synthetic construct; identical to SEQ ID NO: 1643
  source 1..103: mol_type = other RNA
  modified_base 1: mod_base = OTHER; note = 2'-O-methyl ribonucleotide
  modified_base 2: mod_base = OTHER; note = 2'-O-methyl ribonucleotide
  modified_base 3: mod_base = OTHER; note = 2'-O-methyl ribonucleotide
  modified_base 21: mod_base = OTHER; note = 2'-O-methyl ribonucleotide
  modified_base 28: mod_base = OTHER; note = 2'-O-methyl ribonucleotide
  modified_base 29: mod_base = OTHER; note = 2'-O-methyl ribonucleotide
  modified_base 30: mod_base = OTHER; note = 2'-O-methyl ribonucleotide
  modified_base 31: mod_base = OTHER; note = 2'-O-methyl ribonucleotide
  modified_base 32: mod_base = OTHER; note = 2'-O-methyl ribonucleotide
  modified_base 34: mod_base = OTHER; note = 2'-O-methyl ribonucleotide
  modified_base 35: mod_base = OTHER; note = 2'-O-methyl ribonucleotide
  modified_base 36: mod_base = OTHER; note = 2'-O-methyl ribonucleotide
  modified_base 37: mod_base = OTHER; note = 2'-O-methyl ribonucleotide
  modified_base 38: mod_base = OTHER; note = 2'-O-methyl ribonucleotide
  modified_base 39: mod_base = OTHER; note = 2'-O-methyl ribonucleotide
  modified_base 40: mod_base = OTHER; note = 2'-O-methyl ribonucleotide
  modified_base 41: mod_base = OTHER; note = 2'-O-methyl ribonucleotide
  modified_base 42: mod_base = OTHER; note = 2'-O-methyl ribonucleotide
  modified_base 46: mod_base = OTHER; note = 2'-O-methyl ribonucleotide
  modified_base 48: mod_base = OTHER; note = 2'-O-methyl ribonucleotide
  modified_base 50: mod_base = OTHER; note = 2'-O-methyl ribonucleotide
  modified_base 52: mod_base = OTHER; note = 2'-O-methyl ribonucleotide
  modified_base 53: mod_base = OTHER; note = 2'-O-methyl ribonucleotide
  modified_base 54: mod_base = OTHER; note = 2'-O-methyl ribonucleotide
  modified_base 55: mod_base = OTHER; note = 2'-O-methyl ribonucleotide
  modified_base 56: mod_base = OTHER; note = 2'-O-methyl ribonucleotide
  modified_base 57: mod_base = OTHER; note = 2'-O-methyl ribonucleotide
  modified_base 60: mod_base = OTHER; note = 2'-O-methyl ribonucleotide
  modified_base 61: mod_base = OTHER; note = 2'-O-methyl ribonucleotide
  modified_base 66: mod_base = OTHER; note = 2'-O-methyl ribonucleotide
  modified_base 67: mod_base = OTHER; note = 2'-O-methyl ribonucleotide
  modified_base 70: mod_base = OTHER; note = 2'-O-methyl ribonucleotide
  modified_base 71: mod_base = OTHER; note = 2'-O-methyl ribonucleotide
  modified_base 72: mod_base = OTHER; note = 2'-O-methyl ribonucleotide
  modified_base 74: mod_base = OTHER; note = 2'-O-methyl ribonucleotide
  modified_base 75: mod_base = OTHER; note = 2'-O-methyl ribonucleotide
  modified_base 76: mod_base = OTHER; note = 2'-O-methyl ribonucleotide
  modified_base 77: mod_base = OTHER; note = 2'-O-methyl ribonucleotide
  modified_base 78: mod_base = OTHER; note = 2'-O-methyl ribonucleotide
  modified_base 79: mod_base = OTHER; note = 2'-O-methyl ribonucleotide
  modified_base 80: mod_base = OTHER; note = 2'-O-methyl ribonucleotide
  modified_base 81: mod_base = OTHER; note = 2'-O-methyl ribonucleotide
  modified_base 83: mod_base = OTHER; note = 2'-O-methyl ribonucleotide
  modified_base 84: mod_base = OTHER; note = 2'-O-methyl ribonucleotide
  modified_base 85: mod_base = OTHER; note = 2'-O-methyl ribonucleotide
  modified_base 86: mod_base = OTHER; note = 2'-O-methyl ribonucleotide
  modified_base 87: mod_base = OTHER; note = 2'-O-methyl ribonucleotide
  modified_base 88: mod_base = OTHER; note = 2'-O-methyl ribonucleotide
  modified_base 89: mod_base = OTHER; note = 2'-O-methyl ribonucleotide
  modified_base 90: mod_base = OTHER; note = 2'-O-methyl ribonucleotide
  modified_base 91: mod_base = OTHER; note = 2'-O-methyl ribonucleotide
  modified_base 92: mod_base = OTHER; note = 2'-O-methyl ribonucleotide
  modified_base 93: mod_base = OTHER; note = 2'-O-methyl ribonucleotide
  modified_base 94: mod_base = OTHER; note = 2'-O-methyl ribonucleotide
  modified_base 95: mod_base = OTHER; note = 2'-O-methyl ribonucleotide
  modified_base 96: mod_base = OTHER; note = 2'-O-methyl ribonucleotide
  modified_base 97: mod_base = OTHER; note = 2'-O-methyl ribonucleotide
  modified_base 98: mod_base = OTHER; note = 2'-O-methyl ribonucleotide
  modified_base 99: mod_base = OTHER; note = 2'-O-methyl ribonucleotide
  modified_base 100: mod_base = OTHER; note = 2'-O-methyl ribonucleotide
  modified_base 1..3: mod_base = OTHER; note = phosphorothioate linkage
  modified_base 25..26: mod_base = OTHER; note = phosphorothioate linkage
  modified_base 45..46: mod_base = OTHER; note = phosphorothioate linkage
  modified_base 98..100: mod_base = OTHER; note = phosphorothioate linkage

SEQ ID NO: 2765 - RNA, 103 nt, synthetic construct; identical to SEQ ID NO: 1699
  source 1..103: mol_type = other RNA
  modified_base 1: mod_base = OTHER; note = 2'-O-methyl ribonucleotide
  modified_base 2: mod_base = OTHER; note = 2'-O-methyl ribonucleotide
  modified_base 3: mod_base = OTHER; note = 2'-O-methyl ribonucleotide
  modified_base 21: mod_base = OTHER; note = 2'-O-methyl ribonucleotide
  modified_base 28: mod_base = OTHER; note = 2'-O-methyl ribonucleotide
  modified_base 29: mod_base = OTHER; note = 2'-O-methyl ribonucleotide
  modified_base 30: mod_base = OTHER; note = 2'-O-methyl ribonucleotide
  modified_base 31: mod_base = OTHER; note = 2'-O-methyl ribonucleotide
  modified_base 32: mod_base = OTHER; note = 2'-O-methyl ribonucleotide
  modified_base 33: mod_base = OTHER; note = 2'-O-methyl ribonucleotide
  modified_base 34: mod_base = OTHER; note = 2'-O-methyl ribonucleotide
  modified_base 35: mod_base = OTHER; note = 2'-O-methyl ribonucleotide
  modified_base 36: mod_base = OTHER; note = 2'-O-methyl ribonucleotide
  modified_base 37: mod_base = OTHER; note = 2'-O-methyl ribonucleotide
  modified_base 38: mod_base = OTHER; note = 2'-O-methyl ribonucleotide
  modified_base 39: mod_base = OTHER; note = 2'-O-methyl ribonucleotide
  modified_base 40: mod_base = OTHER; note = 2'-O-methyl ribonucleotide
  modified_base 41: mod_base = OTHER; note = 2'-O-methyl ribonucleotide
  modified_base 42: mod_base = OTHER; note = 2'-O-methyl ribonucleotide
  modified_base 46: mod_base = OTHER; note = 2'-O-methyl ribonucleotide
  modified_base 48: mod_base = OTHER; note = 2'-O-methyl ribonucleotide
  modified_base 50: mod_base = OTHER; note = 2'-O-methyl ribonucleotide
  modified_base 52: mod_base = OTHER; note = 2'-O-methyl ribonucleotide
  modified_base 53: mod_base = OTHER; note = 2'-O-methyl ribonucleotide
  modified_base 54: mod_base = OTHER; note = 2'-O-methyl ribonucleotide
  modified_base 55: mod_base = OTHER; note = 2'-O-methyl ribonucleotide
  modified_base 56: mod_base = OTHER; note = 2'-O-methyl ribonucleotide
  modified_base 57: mod_base = OTHER; note = 2'-O-methyl ribonucleotide
  modified_base 60: mod_base = OTHER; note = 2'-O-methyl ribonucleotide
  modified_base 61: mod_base = OTHER; note = 2'-O-methyl ribonucleotide
  modified_base 66: mod_base = OTHER; note = 2'-O-methyl ribonucleotide
  modified_base 67: mod_base = OTHER; note = 2'-O-methyl ribonucleotide
  modified_base 70: mod_base = OTHER; note = 2'-O-methyl ribonucleotide
  modified_base 71: mod_base = OTHER; note = 2'-O-methyl ribonucleotide
  modified_base 72: mod_base = OTHER; note = 2'-O-methyl ribonucleotide
  modified_base 73: mod_base = OTHER; note = 2'-O-methyl ribonucleotide
  modified_base 74: mod_base = OTHER; note = 2'-O-methyl ribonucleotide
  modified_base 75: mod_base = OTHER; note = 2'-O-methyl ribonucleotide
  modified_base 76: mod_base = OTHER; note = 2'-O-methyl ribonucleotide
  modified_base 77: mod_base = OTHER; note = 2'-O-methyl ribonucleotide
  modified_base 78: mod_base = OTHER; note = 2'-O-methyl ribonucleotide
  modified_base 79: mod_base = OTHER; note = 2'-O-methyl ribonucleotide
  modified_base 80: mod_base = OTHER; note = 2'-O-methyl ribonucleotide
  modified_base 81: mod_base = OTHER; note = 2'-O-methyl ribonucleotide
  modified_base 83: mod_base = OTHER; note = 2'-O-methyl ribonucleotide
  modified_base 84: mod_base = OTHER; note = 2'-O-methyl ribonucleotide
  modified_base 85: mod_base = OTHER; note = 2'-O-methyl ribonucleotide
  modified_base 86: mod_base = OTHER; note = 2'-O-methyl ribonucleotide
  modified_base 87: mod_base = OTHER; note = 2'-O-methyl ribonucleotide
  modified_base 88: mod_base = OTHER; note = 2'-O-methyl ribonucleotide
  modified_base 89: mod_base = OTHER; note = 2'-O-methyl ribonucleotide
  modified_base 90: mod_base = OTHER; note = 2'-O-methyl ribonucleotide
  modified_base 91: mod_base = OTHER; note = 2'-O-methyl ribonucleotide
  modified_base 92: mod_base = OTHER; note = 2'-O-methyl ribonucleotide
  modified_base 93: mod_base = OTHER; note = 2'-O-methyl ribonucleotide
  modified_base 94: mod_base = OTHER; note = 2'-O-methyl ribonucleotide
  modified_base 95: mod_base = OTHER; note = 2'-O-methyl ribonucleotide
  modified_base 96: mod_base = OTHER; note = 2'-O-methyl ribonucleotide
  modified_base 97: mod_base = OTHER; note = 2'-O-methyl ribonucleotide
  modified_base 98: mod_base = OTHER; note = 2'-O-methyl ribonucleotide
  modified_base 99: mod_base = OTHER; note = 2'-O-methyl ribonucleotide
  modified_base 100: mod_base = OTHER; note = 2'-O-methyl ribonucleotide
  modified_base 1..3: mod_base = OTHER; note = phosphorothioate linkage
  modified_base 25..26: mod_base = OTHER; note = phosphorothioate linkage
  modified_base 45..46: mod_base = OTHER; note = phosphorothioate linkage
  modified_base 98..100: mod_base = OTHER; note = phosphorothioate linkage

SEQ ID NO: 2766 - RNA, 103 nt, synthetic construct; identical to SEQ ID NO: 1699
  source 1..103: mol_type = other RNA
  modified_base 1: mod_base = OTHER; note = 2'-O-methyl ribonucleotide
  modified_base 2: mod_base = OTHER; note = 2'-O-methyl ribonucleotide
  modified_base 3: mod_base = OTHER; note = 2'-O-methyl ribonucleotide
  modified_base 21: mod_base = OTHER; note = 2'-O-methyl ribonucleotide
  modified_base 28: mod_base = OTHER; note = 2'-O-methyl ribonucleotide
  modified_base 29: mod_base = OTHER; note = 2'-O-methyl ribonucleotide
  modified_base 30: mod_base = OTHER; note = 2'-O-methyl ribonucleotide
  modified_base 31: mod_base = OTHER; note = 2'-O-methyl ribonucleotide
  modified_base 32: mod_base = OTHER; note = 2'-O-methyl ribonucleotide
  modified_base 34: mod_base = OTHER; note = 2'-O-methyl ribonucleotide
  modified_base 35: mod_base = OTHER; note = 2'-O-methyl ribonucleotide
  modified_base 36: mod_base = OTHER; note = 2'-O-methyl ribonucleotide
  modified_base 37: mod_base = OTHER; note = 2'-O-methyl ribonucleotide
  modified_base 38: mod_base = OTHER; note = 2'-O-methyl ribonucleotide
  modified_base 39: mod_base = OTHER; note = 2'-O-methyl ribonucleotide
  modified_base 40: mod_base = OTHER; note = 2'-O-methyl ribonucleotide
  modified_base 41: mod_base = OTHER; note = 2'-O-methyl ribonucleotide
  modified_base 42: mod_base = OTHER; note = 2'-O-methyl ribonucleotide
  modified_base 46: mod_base = OTHER; note = 2'-O-methyl ribonucleotide
  modified_base 48: mod_base = OTHER; note = 2'-O-methyl ribonucleotide
  modified_base 50: mod_base = OTHER; note = 2'-O-methyl ribonucleotide
  modified_base 52: mod_base = OTHER; note = 2'-O-methyl ribonucleotide
  modified_base 53: mod_base = OTHER; note = 2'-O-methyl ribonucleotide
  modified_base 54: mod_base = OTHER; note = 2'-O-methyl ribonucleotide
  modified_base 55: mod_base = OTHER; note = 2'-O-methyl ribonucleotide
  modified_base 56: mod_base = OTHER; note = 2'-O-methyl ribonucleotide
  modified_base 57: mod_base = OTHER; note = 2'-O-methyl ribonucleotide
  modified_base 60: mod_base = OTHER; note = 2'-O-methyl ribonucleotide
  modified_base 61: mod_base = OTHER; note = 2'-O-methyl ribonucleotide
  modified_base 66: mod_base = OTHER; note = 2'-O-methyl ribonucleotide
  modified_base 67: mod_base = OTHER; note = 2'-O-methyl ribonucleotide
  modified_base 70: mod_base = OTHER; note = 2'-O-methyl ribonucleotide
  modified_base 71: mod_base = OTHER; note = 2'-O-methyl ribonucleotide
  modified_base 72: mod_base = OTHER; note = 2'-O-methyl ribonucleotide
  modified_base 74: mod_base = OTHER; note = 2'-O-methyl ribonucleotide
  modified_base 75: mod_base = OTHER; note = 2'-O-methyl ribonucleotide
  modified_base 76: mod_base = OTHER; note = 2'-O-methyl ribonucleotide
  modified_base 77: mod_base = OTHER; note = 2'-O-methyl ribonucleotide
  modified_base 78: mod_base = OTHER; note = 2'-O-methyl ribonucleotide
  modified_base 79: mod_base = OTHER; note = 2'-O-methyl ribonucleotide
  modified_base 80: mod_base = OTHER; note = 2'-O-methyl ribonucleotide
  modified_base 81: mod_base = OTHER; note = 2'-O-methyl ribonucleotide
  modified_base 83: mod_base = OTHER; note = 2'-O-methyl ribonucleotide
  modified_base 84: mod_base = OTHER; note = 2'-O-methyl ribonucleotide
  modified_base 85: mod_base = OTHER; note = 2'-O-methyl ribonucleotide
  modified_base 86: mod_base = OTHER; note = 2'-O-methyl ribonucleotide
  modified_base 87: mod_base = OTHER; note = 2'-O-methyl ribonucleotide
  modified_base 88: mod_base = OTHER; note = 2'-O-methyl ribonucleotide
  modified_base 89: mod_base = OTHER; note = 2'-O-methyl ribonucleotide
  modified_base 90: mod_base = OTHER; note = 2'-O-methyl ribonucleotide
  modified_base 91: mod_base = OTHER; note = 2'-O-methyl ribonucleotide
  modified_base 92: mod_base = OTHER; note = 2'-O-methyl ribonucleotide
  modified_base 93: mod_base = OTHER; note = 2'-O-methyl ribonucleotide
  modified_base 94: mod_base = OTHER; note = 2'-O-methyl ribonucleotide
  modified_base 95: mod_base = OTHER; note = 2'-O-methyl ribonucleotide
  modified_base 96: mod_base = OTHER; note = 2'-O-methyl ribonucleotide
  modified_base 97: mod_base = OTHER; note = 2'-O-methyl ribonucleotide
  modified_base 98: mod_base = OTHER; note = 2'-O-methyl ribonucleotide
  modified_base 99: mod_base = OTHER; note = 2'-O-methyl ribonucleotide
  modified_base 100: mod_base = OTHER; note = 2'-O-methyl ribonucleotide
  modified_base 1..3: mod_base = OTHER; note = phosphorothioate linkage
  modified_base 25..26: mod_base = OTHER; note = phosphorothioate linkage
  modified_base 45..46: mod_base = OTHER; note = phosphorothioate linkage
  modified_base 98..100: mod_base = OTHER; note = phosphorothioate linkage

SEQ ID NO: 2767 - RNA, 103 nt, synthetic construct; identical to SEQ ID NO: 1700
  source 1..103: mol_type = other RNA
  modified_base 1: mod_base = OTHER; note = 2'-O-methyl ribonucleotide
  modified_base 2: mod_base = OTHER; note = 2'-O-methyl ribonucleotide
  modified_base 3: mod_base = OTHER; note = 2'-O-methyl ribonucleotide
  modified_base 21: mod_base = OTHER; note = 2'-O-methyl ribonucleotide
  modified_base 28: mod_base = OTHER; note = 2'-O-methyl ribonucleotide
  modified_base 29: mod_base = OTHER; note = 2'-O-methyl ribonucleotide
  modified_base 30: mod_base = OTHER; note = 2'-O-methyl ribonucleotide
  modified_base 31: mod_base = OTHER; note = 2'-O-methyl ribonucleotide
  modified_base 32: mod_base = OTHER; note = 2'-O-methyl ribonucleotide
  modified_base 33: mod_base = OTHER; note = 2'-O-methyl ribonucleotide
  modified_base 34: mod_base = OTHER; note = 2'-O-methyl ribonucleotide
  modified_base 35: mod_base = OTHER; note = 2'-O-methyl ribonucleotide
  modified_base 36: mod_base = OTHER; note = 2'-O-methyl ribonucleotide
  modified_base 37: mod_base = OTHER; note = 2'-O-methyl ribonucleotide
  modified_base 38: mod_base = OTHER; note = 2'-O-methyl ribonucleotide
  modified_base 39: mod_base = OTHER; note = 2'-O-methyl ribonucleotide
  modified_base 40: mod_base = OTHER; note = 2'-O-methyl ribonucleotide
  modified_base 41: mod_base = OTHER; note = 2'-O-methyl ribonucleotide
  modified_base 42: mod_base = OTHER; note = 2'-O-methyl ribonucleotide
  modified_base 46: mod_base = OTHER; note = 2'-O-methyl ribonucleotide
  modified_base 48: mod_base = OTHER; note = 2'-O-methyl ribonucleotide
  modified_base 50: mod_base = OTHER; note = 2'-O-methyl ribonucleotide
  modified_base 52: mod_base = OTHER; note = 2'-O-methyl ribonucleotide
  modified_base 53: mod_base = OTHER; note = 2'-O-methyl ribonucleotide
  modified_base 54: mod_base = OTHER; note = 2'-O-methyl ribonucleotide
  modified_base 57: mod_base = OTHER; note = 2'-O-methyl ribonucleotide
  modified_base 61: mod_base = OTHER; note = 2'-O-methyl ribonucleotide
  modified_base 66: mod_base = OTHER; note = 2'-O-methyl ribonucleotide
  modified_base 67: mod_base = OTHER; note = 2'-O-methyl ribonucleotide
  modified_base 70: mod_base = OTHER; note = 2'-O-methyl ribonucleotide
  modified_base 71: mod_base = OTHER; note = 2'-O-methyl ribonucleotide
  modified_base 72: mod_base = OTHER; note = 2'-O-methyl ribonucleotide
  modified_base 74: mod_base = OTHER; note = 2'-O-methyl ribonucleotide
  modified_base 75: mod_base = OTHER; note = 2'-O-methyl ribonucleotide
  modified_base 76: mod_base = OTHER; note = 2'-O-methyl ribonucleotide
  modified_base 77: mod_base = OTHER; note = 2'-O-methyl ribonucleotide
  modified_base 78: mod_base = OTHER; note = 2'-O-methyl ribonucleotide
  modified_base 79: mod_base = OTHER; note = 2'-O-methyl ribonucleotide
  modified_base 80: mod_base = OTHER; note = 2'-O-methyl ribonucleotide
  modified_base 82: mod_base = OTHER; note = 2'-O-methyl ribonucleotide
  modified_base 83: mod_base = OTHER; note = 2'-O-methyl ribonucleotide
  modified_base 84: mod_base = OTHER; note = 2'-O-methyl ribonucleotide
  modified_base 85: mod_base = OTHER; note = 2'-O-methyl ribonucleotide
  modified_base 86: mod_base = OTHER; note = 2'-O-methyl ribonucleotide
  modified_base 87: mod_base = OTHER; note = 2'-O-methyl ribonucleotide
  modified_base 89: mod_base = OTHER; note = 2'-O-methyl ribonucleotide
  modified_base 92: mod_base = OTHER; note = 2'-O-methyl ribonucleotide
  modified_base 93: mod_base = OTHER; note = 2'-O-methyl ribonucleotide
  modified_base 94: mod_base = OTHER; note = 2'-O-methyl ribonucleotide
  modified_base 95: mod_base = OTHER; note = 2'-O-methyl ribonucleotide
  modified_base 96: mod_base = OTHER; note = 2'-O-methyl ribonucleotide
  modified_base 97: mod_base = OTHER; note = 2'-O-methyl ribonucleotide
  modified_base 98: mod_base = OTHER; note = 2'-O-methyl ribonucleotide
  modified_base 99: mod_base = OTHER; note = 2'-O-methyl ribonucleotide
  modified_base 100: mod_base = OTHER; note = 2'-O-methyl ribonucleotide
  modified_base 1..3: mod_base = OTHER; note = phosphorothioate linkage
  modified_base 25..26: mod_base = OTHER; note = phosphorothioate linkage
  modified_base 45..46: mod_base = OTHER; note = phosphorothioate linkage
  modified_base 98..100: mod_base = OTHER; note = phosphorothioate linkage

SEQ ID NO: 2768 - RNA, 103 nt, synthetic construct; identical to SEQ ID NO: 1700
  source 1..103: mol_type = other RNA
  modified_base 1: mod_base = OTHER; note = 2'-O-methyl ribonucleotide
  modified_base 2: mod_base = OTHER; note = 2'-O-methyl ribonucleotide
  modified_base 3: mod_base = OTHER; note = 2'-O-methyl ribonucleotide
  modified_base 21: mod_base = OTHER; note = 2'-O-methyl ribonucleotide
  modified_base 28: mod_base = OTHER; note = 2'-O-methyl ribonucleotide
  modified_base 29: mod_base = OTHER; note = 2'-O-methyl ribonucleotide
  modified_base 30: mod_base = OTHER; note = 2'-O-methyl ribonucleotide
  modified_base 31: mod_base = OTHER; note = 2'-O-methyl ribonucleotide
  modified_base 32: mod_base = OTHER; note = 2'-O-methyl ribonucleotide
  modified_base 33: mod_base = OTHER; note = 2'-O-methyl ribonucleotide
  modified_base 34: mod_base = OTHER; note = 2'-O-methyl ribonucleotide
  modified_base 35: mod_base = OTHER; note = 2'-O-methyl ribonucleotide
  modified_base 36: mod_base = OTHER; note = 2'-O-methyl ribonucleotide
  modified_base 37: mod_base = OTHER; note = 2'-O-methyl ribonucleotide
  modified_base 38: mod_base = OTHER; note = 2'-O-methyl ribonucleotide
  modified_base 39: mod_base = OTHER; note = 2'-O-methyl ribonucleotide
  modified_base 40: mod_base = OTHER; note = 2'-O-methyl ribonucleotide
  modified_base 41: mod_base = OTHER; note = 2'-O-methyl ribonucleotide
  modified_base 42: mod_base = OTHER; note = 2'-O-methyl ribonucleotide
  modified_base 46: mod_base = OTHER; note = 2'-O-methyl ribonucleotide
  modified_base 48: mod_base = OTHER; note = 2'-O-methyl ribonucleotide
  modified_base 50: mod_base = OTHER; note = 2'-O-methyl ribonucleotide
  modified_base 52: mod_base = OTHER; note = 2'-O-methyl ribonucleotide
  modified_base 53: mod_base = OTHER; note = 2'-O-methyl ribonucleotide
  modified_base 54: mod_base = OTHER; note = 2'-O-methyl ribonucleotide
  modified_base 55: mod_base = OTHER; note = 2'-O-methyl ribonucleotide
  modified_base 56: mod_base = OTHER; note = 2'-O-methyl ribonucleotide
  modified_base 57: mod_base = OTHER; note = 2'-O-methyl ribonucleotide
  modified_base 60: mod_base = OTHER; note = 2'-O-methyl ribonucleotide
  modified_base 61: mod_base = OTHER; note = 2'-O-methyl ribonucleotide
  modified_base 66: mod_base = OTHER; note = 2'-O-methyl ribonucleotide
  modified_base 67: mod_base = OTHER; note = 2'-O-methyl ribonucleotide
  modified_base 70: mod_base = OTHER; note = 2'-O-methyl ribonucleotide
  modified_base 71: mod_base = OTHER; note = 2'-O-methyl ribonucleotide
  modified_base 72: mod_base = OTHER; note = 2'-O-methyl ribonucleotide
  modified_base 74: mod_base = OTHER; note = 2'-O-methyl ribonucleotide
  modified_base 75: mod_base = OTHER; note = 2'-O-methyl ribonucleotide
  modified_base 76: mod_base = OTHER; note = 2'-O-methyl ribonucleotide
  modified_base 77: mod_base = OTHER; note = 2'-O-methyl ribonucleotide
  modified_base 78: mod_base = OTHER; note = 2'-O-methyl ribonucleotide
  modified_base 79: mod_base = OTHER; note = 2'-O-methyl ribonucleotide
  modified_base 80: mod_base = OTHER; note = 2'-O-methyl ribonucleotide
  modified_base 82: mod_base = OTHER; note = 2'-O-methyl ribonucleotide
  modified_base 83: mod_base = OTHER; note = 2'-O-methyl ribonucleotide
  modified_base 84: mod_base = OTHER; note = 2'-O-methyl ribonucleotide
  modified_base 85: mod_base = OTHER; note = 2'-O-methyl ribonucleotide
  modified_base 86: mod_base = OTHER; note = 2'-O-methyl ribonucleotide
  modified_base 87: mod_base = OTHER; note = 2'-O-methyl ribonucleotide
  modified_base 89: mod_base = OTHER; note = 2'-O-methyl ribonucleotide
  modified_base 92: mod_base = OTHER; note = 2'-O-methyl ribonucleotide
  modified_base 93: mod_base = OTHER; note = 2'-O-methyl ribonucleotide
  modified_base 94: mod_base = OTHER; note = 2'-O-methyl ribonucleotide
  modified_base 95: mod_base = OTHER; note = 2'-O-methyl ribonucleotide
  modified_base 96: mod_base = OTHER; note = 2'-O-methyl ribonucleotide
  modified_base 97: mod_base = OTHER; note = 2'-O-methyl ribonucleotide
  modified_base 98: mod_base = OTHER; note = 2'-O-methyl ribonucleotide
  modified_base 99: mod_base = OTHER; note = 2'-O-methyl ribonucleotide
  modified_base 100: mod_base = OTHER; note = 2'-O-methyl ribonucleotide
  modified_base 1..3: mod_base = OTHER; note = phosphorothioate linkage
  modified_base 25..26: mod_base = OTHER; note = phosphorothioate linkage
  modified_base 45..46: mod_base = OTHER; note = phosphorothioate linkage
  modified_base 98..100: mod_base = OTHER; note = phosphorothioate linkage

SEQ ID NO: 2769 - RNA, 103 nt, synthetic construct; identical to SEQ ID NO: 1700
  source 1..103: mol_type = other RNA
  modified_base 1: mod_base = OTHER; note = 2'-O-methyl ribonucleotide
  modified_base 2: mod_base = OTHER; note = 2'-O-methyl ribonucleotide
  modified_base 3: mod_base = OTHER; note = 2'-O-methyl ribonucleotide
  modified_base 21: mod_base = OTHER; note = 2'-O-methyl ribonucleotide
  modified_base 28: mod_base = OTHER; note = 2'-O-methyl ribonucleotide
  modified_base 29: mod_base = OTHER; note = 2'-O-methyl ribonucleotide
  modified_base 30: mod_base = OTHER; note = 2'-O-methyl ribonucleotide
  modified_base 31: mod_base = OTHER; note = 2'-O-methyl ribonucleotide
  modified_base 32: mod_base = OTHER; note = 2'-O-methyl ribonucleotide
  modified_base 33: mod_base = OTHER; note = 2'-O-methyl ribonucleotide
  modified_base 34: mod_base = OTHER; note = 2'-O-methyl ribonucleotide
  modified_base 35: mod_base = OTHER; note = 2'-O-methyl ribonucleotide
  modified_base 36: mod_base = OTHER; note = 2'-O-methyl ribonucleotide
  modified_base 37: mod_base = OTHER; note = 2'-O-methyl ribonucleotide
  modified_base 38: mod_base = OTHER; note = 2'-O-methyl ribonucleotide
  modified_base 39: mod_base = OTHER; note = 2'-O-methyl ribonucleotide
  modified_base 40: mod_base = OTHER; note = 2'-O-methyl ribonucleotide
  modified_base 41: mod_base = OTHER; note = 2'-O-methyl ribonucleotide
  modified_base 42: mod_base = OTHER; note = 2'-O-methyl ribonucleotide
  modified_base 46: mod_base = OTHER; note = 2'-O-methyl ribonucleotide
  modified_base 48: mod_base = OTHER; note = 2'-O-methyl ribonucleotide
  modified_base 50: mod_base = OTHER; note = 2'-O-methyl ribonucleotide
  modified_base 52: mod_base = OTHER; note = 2'-O-methyl ribonucleotide
  modified_base 53: mod_base = OTHER; note = 2'-O-methyl ribonucleotide
  modified_base 54: mod_base = OTHER; note = 2'-O-methyl ribonucleotide
  modified_base 57: mod_base = OTHER; note = 2'-O-methyl ribonucleotide
  modified_base 61: mod_base = OTHER; note = 2'-O-methyl ribonucleotide
  modified_base 66: mod_base = OTHER; note = 2'-O-methyl ribonucleotide
  modified_base 67: mod_base = OTHER; note = 2'-O-methyl ribonucleotide
  modified_base 70: mod_base = OTHER; note = 2'-O-methyl ribonucleotide
  modified_base 71: mod_base = OTHER; note = 2'-O-methyl ribonucleotide
  modified_base 72: mod_base = OTHER; note = 2'-O-methyl ribonucleotide
  modified_base 73: mod_base = OTHER; note = 2'-O-methyl ribonucleotide
  modified_base 74: mod_base = OTHER; note = 2'-O-methyl ribonucleotide
  modified_base 75: mod_base = OTHER; note = 2'-O-methyl ribonucleotide
  modified_base 76: mod_base = OTHER; note = 2'-O-methyl ribonucleotide
  modified_base 77: mod_base = OTHER; note = 2'-O-methyl ribonucleotide
  modified_base 78: mod_base = OTHER; note = 2'-O-methyl ribonucleotide
  modified_base 79: mod_base = OTHER; note = 2'-O-methyl ribonucleotide
  modified_base 80: mod_base = OTHER; note = 2'-O-methyl ribonucleotide
  modified_base 82: mod_base = OTHER; note = 2'-O-methyl ribonucleotide
  modified_base 83: mod_base = OTHER; note = 2'-O-methyl ribonucleotide
  modified_base 84: mod_base = OTHER; note = 2'-O-methyl ribonucleotide
  modified_base 85: mod_base = OTHER; note = 2'-O-methyl ribonucleotide
  modified_base 86: mod_base = OTHER; note = 2'-O-methyl ribonucleotide
  modified_base 87: mod_base = OTHER; note = 2'-O-methyl ribonucleotide
  modified_base 89: mod_base = OTHER; note = 2'-O-methyl ribonucleotide
  modified_base 92: mod_base = OTHER; note = 2'-O-methyl ribonucleotide
  modified_base 93: mod_base = OTHER; note = 2'-O-methyl ribonucleotide
  modified_base 94: mod_base = OTHER; note = 2'-O-methyl ribonucleotide
  modified_base 95: mod_base = OTHER; note = 2'-O-methyl ribonucleotide
  modified_base 96: mod_base = OTHER; note = 2'-O-methyl ribonucleotide
  modified_base 97: mod_base = OTHER; note = 2'-O-methyl ribonucleotide
  modified_base 98: mod_base = OTHER; note = 2'-O-methyl ribonucleotide
  modified_base 99: mod_base = OTHER; note = 2'-O-methyl ribonucleotide
  modified_base 100: mod_base = OTHER; note = 2'-O-methyl ribonucleotide
  modified_base 1..3: mod_base = OTHER; note = phosphorothioate linkage
  modified_base 25..26: mod_base = OTHER; note = phosphorothioate linkage
  modified_base 45..46: mod_base = OTHER; note = phosphorothioate linkage
  modified_base 98..100: mod_base = OTHER; note = phosphorothioate linkage

SEQ ID NO: 2770 - RNA, 103 nt, synthetic construct; identical to SEQ ID NO: 1700
  source 1..103: mol_type = other RNA
  modified_base 1: mod_base = OTHER; note = 2'-O-methyl ribonucleotide
  modified_base 2: mod_base = OTHER; note = 2'-O-methyl ribonucleotide
  modified_base 3: mod_base = OTHER; note = 2'-O-methyl ribonucleotide
  modified_base 21: mod_base = OTHER; note = 2'-O-methyl ribonucleotide
  modified_base 28: mod_base = OTHER; note = 2'-O-methyl ribonucleotide
  modified_base 29: mod_base = OTHER; note = 2'-O-methyl ribonucleotide
  modified_base 30: mod_base = OTHER; note = 2'-O-methyl ribonucleotide
  modified_base 31: mod_base = OTHER; note = 2'-O-methyl ribonucleotide
  modified_base 32: mod_base = OTHER; note = 2'-O-methyl ribonucleotide
  modified_base 33: mod_base = OTHER; note = 2'-O-methyl ribonucleotide
  modified_base 34: mod_base = OTHER; note = 2'-O-methyl ribonucleotide
  modified_base 35: mod_base = OTHER; note = 2'-O-methyl ribonucleotide
  modified_base 36: mod_base = OTHER; note = 2'-O-methyl ribonucleotide
  modified_base 37: mod_base = OTHER; note = 2'-O-methyl ribonucleotide
  modified_base 38: mod_base = OTHER; note = 2'-O-methyl ribonucleotide
  modified_base 39: mod_base = OTHER; note = 2'-O-methyl ribonucleotide
  modified_base 40: mod_base = OTHER; note = 2'-O-methyl ribonucleotide
  modified_base 41: mod_base = OTHER; note = 2'-O-methyl ribonucleotide
  modified_base 42: mod_base = OTHER; note = 2'-O-methyl ribonucleotide
  modified_base 46: mod_base = OTHER; note = 2'-O-methyl ribonucleotide
  modified_base 48: mod_base = OTHER; note = 2'-O-methyl ribonucleotide
  modified_base 50: mod_base = OTHER; note = 2'-O-methyl ribonucleotide
  modified_base 52: mod_base = OTHER; note = 2'-O-methyl ribonucleotide
  modified_base 53: mod_base = OTHER; note = 2'-O-methyl ribonucleotide
  modified_base 54: mod_base = OTHER; note = 2'-O-methyl ribonucleotide
  modified_base 57: mod_base = OTHER; note = 2'-O-methyl ribonucleotide
  modified_base 61: mod_base = OTHER; note = 2'-O-methyl ribonucleotide
  modified_base 66: mod_base = OTHER; note = 2'-O-methyl ribonucleotide
  modified_base 67: mod_base = OTHER; note = 2'-O-methyl ribonucleotide
  modified_base 70: mod_base = OTHER; note = 2'-O-methyl ribonucleotide
  modified_base 71: mod_base = OTHER; note = 2'-O-methyl ribonucleotide
  modified_base 72: mod_base = OTHER; note = 2'-O-methyl ribonucleotide
  modified_base 73: mod_base = OTHER; note = 2'-O-methyl ribonucleotide
  modified_base 74: mod_base = OTHER; note = 2'-O-methyl ribonucleotide
  modified_base 75: mod_base = OTHER; note = 2'-O-methyl ribonucleotide
  modified_base 76: mod_base = OTHER; note = 2'-O-methyl ribonucleotide
  modified_base 77: mod_base = OTHER; note = 2'-O-methyl ribonucleotide
  modified_base 78: mod_base = OTHER; note = 2'-O-methyl ribonucleotide
  modified_base 79: mod_base = OTHER; note = 2'-O-methyl ribonucleotide
  modified_base 80: mod_base = OTHER; note = 2'-O-methyl ribonucleotide
  modified_base 82: mod_base = OTHER; note = 2'-O-methyl ribonucleotide
  modified_base 83: mod_base = OTHER; note = 2'-O-methyl ribonucleotide
  modified_base 84: mod_base = OTHER; note = 2'-O-methyl ribonucleotide
  modified_base 85: mod_base = OTHER; note = 2'-O-methyl ribonucleotide
  modified_base 86: mod_base = OTHER; note = 2'-O-methyl ribonucleotide
  modified_base 87: mod_base = OTHER; note = 2'-O-methyl ribonucleotide
  modified_base 89: mod_base = OTHER; note = 2'-O-methyl ribonucleotide
  modified_base 91: mod_base = OTHER; note = 2'-O-methyl ribonucleotide
  modified_base 92: mod_base = OTHER; note = 2'-O-methyl ribonucleotide
  modified_base 93: mod_base = OTHER; note = 2'-O-methyl ribonucleotide
  modified_base 94: mod_base = OTHER; note = 2'-O-methyl ribonucleotide
  modified_base 95: mod_base = OTHER; note = 2'-O-methyl ribonucleotide
  modified_base 96: mod_base = OTHER; note = 2'-O-methyl ribonucleotide
  modified_base 97: mod_base = OTHER; note = 2'-O-methyl ribonucleotide
  modified_base 98: mod_base = OTHER; note = 2'-O-methyl ribonucleotide
  modified_base 99: mod_base = OTHER; note = 2'-O-methyl ribonucleotide
  modified_base 100: mod_base = OTHER; note = 2'-O-methyl ribonucleotide
  modified_base 1..3: mod_base = OTHER; note = phosphorothioate linkage
  modified_base 25..26: mod_base = OTHER; note = phosphorothioate linkage
  modified_base 45..46: mod_base = OTHER; note = phosphorothioate linkage
  modified_base 98..100: mod_base = OTHER; note = phosphorothioate linkage

SEQ ID NO: 2771 - RNA, 103 nt, synthetic construct; identical to SEQ ID NO: 1700
  source 1..103: mol_type = other RNA
  modified_base 1: mod_base = OTHER; note = 2'-O-methyl ribonucleotide
  modified_base 2: mod_base = OTHER; note = 2'-O-methyl ribonucleotide
  modified_base 3: mod_base = OTHER; note = 2'-O-methyl ribonucleotide
  modified_base 21: mod_base = OTHER; note = 2'-O-methyl ribonucleotide
  modified_base 28: mod_base = OTHER; note = 2'-O-methyl ribonucleotide
  modified_base 29: mod_base = OTHER; note = 2'-O-methyl ribonucleotide
  modified_base 30: mod_base = OTHER; note = 2'-O-methyl ribonucleotide
  modified_base 31: mod_base = OTHER; note = 2'-O-methyl ribonucleotide
  modified_base 32: mod_base = OTHER; note = 2'-O-methyl ribonucleotide
  modified_base 34: mod_base = OTHER; note = 2'-O-methyl ribonucleotide
  modified_base 35: mod_base = OTHER; note = 2'-O-methyl ribonucleotide
  modified_base 36: mod_base = OTHER; note = 2'-O-methyl ribonucleotide
  modified_base 37: mod_base = OTHER; note = 2'-O-methyl ribonucleotide
  modified_base 38: mod_base = OTHER; note = 2'-O-methyl ribonucleotide
  modified_base 39: mod_base = OTHER; note = 2'-O-methyl ribonucleotide
  modified_base 40: mod_base = OTHER; note = 2'-O-methyl ribonucleotide
  modified_base 41: mod_base = OTHER; note = 2'-O-methyl ribonucleotide
  modified_base 42: mod_base = OTHER; note = 2'-O-methyl ribonucleotide
  modified_base 46: mod_base = OTHER; note = 2'-O-methyl ribonucleotide
  modified_base 48: mod_base = OTHER; note = 2'-O-methyl ribonucleotide
  modified_base 50: mod_base = OTHER; note = 2'-O-methyl ribonucleotide
  modified_base 52: mod_base = OTHER; note = 2'-O-methyl ribonucleotide
  modified_base 53: mod_base = OTHER; note = 2'-O-methyl ribonucleotide
  modified_base 54: mod_base = OTHER; note = 2'-O-methyl ribonucleotide
  modified_base 57: mod_base = OTHER; note = 2'-O-methyl ribonucleotide
  modified_base 61: mod_base = OTHER; note = 2'-O-methyl ribonucleotide
  modified_base 66: mod_base = OTHER; note = 2'-O-methyl ribonucleotide
  modified_base 67: mod_base = OTHER; note = 2'-O-methyl ribonucleotide
  modified_base 70: mod_base = OTHER; note = 2'-O-methyl ribonucleotide
  modified_base 71: mod_base = OTHER; note = 2'-O-methyl ribonucleotide
  modified_base 72: mod_base = OTHER; note = 2'-O-methyl ribonucleotide
  modified_base 73: mod_base = OTHER; note = 2'-O-methyl ribonucleotide
  modified_base 74: mod_base = OTHER; note = 2'-O-methyl ribonucleotide
  modified_base 75: mod_base = OTHER; note = 2'-O-methyl ribonucleotide
  modified_base 76: mod_base = OTHER; note = 2'-O-methyl ribonucleotide
  modified_base 77: mod_base = OTHER; note = 2'-O-methyl ribonucleotide
  modified_base 78: mod_base = OTHER; note = 2'-O-methyl ribonucleotide
  modified_base 79: mod_base = OTHER; note = 2'-O-methyl ribonucleotide
  modified_base 80: mod_base = OTHER; note = 2'-O-methyl ribonucleotide
  modified_base 82: mod_base = OTHER; note = 2'-O-methyl ribonucleotide
  modified_base 83: mod_base = OTHER; note = 2'-O-methyl ribonucleotide
  modified_base 84: mod_base = OTHER; note = 2'-O-methyl ribonucleotide
  modified_base 85: mod_base = OTHER; note = 2'-O-methyl ribonucleotide
  modified_base 86: mod_base = OTHER; note = 2'-O-methyl ribonucleotide
  modified_base 87: mod_base = OTHER; note = 2'-O-methyl ribonucleotide
  modified_base 89: mod_base = OTHER; note = 2'-O-methyl ribonucleotide
  modified_base 92: mod_base = OTHER; note = 2'-O-methyl ribonucleotide
  modified_base 93: mod_base = OTHER; note = 2'-O-methyl ribonucleotide
  modified_base 94: mod_base = OTHER; note = 2'-O-methyl ribonucleotide
  modified_base 95: mod_base = OTHER; note = 2'-O-methyl ribonucleotide
  modified_base 96: mod_base = OTHER; note = 2'-O-methyl ribonucleotide
  modified_base 97: mod_base = OTHER; note = 2'-O-methyl ribonucleotide
  modified_base 98: mod_base = OTHER; note = 2'-O-methyl ribonucleotide
  modified_base 99: mod_base = OTHER; note = 2'-O-methyl ribonucleotide
  modified_base 100: mod_base = OTHER; note = 2'-O-methyl ribonucleotide
  modified_base 1..3: mod_base = OTHER; note = phosphorothioate linkage
  modified_base 25..26: mod_base = OTHER; note = phosphorothioate linkage
  modified_base 45..46: mod_base = OTHER; note = phosphorothioate linkage
  modified_base 98..100: mod_base = OTHER; note = phosphorothioate linkage

SEQ ID NO: 2772 - RNA, 103 nt, synthetic construct; identical to SEQ ID NO: 1700
  source 1..103: mol_type = other RNA
  modified_base 1: mod_base = OTHER; note = 2'-O-methyl ribonucleotide
  modified_base 2: mod_base = OTHER; note = 2'-O-methyl ribonucleotide
  modified_base 3: mod_base = OTHER; note = 2'-O-methyl ribonucleotide
  modified_base 21: mod_base = OTHER; note = 2'-O-methyl ribonucleotide
  modified_base 28: mod_base = OTHER; note = 2'-O-methyl ribonucleotide
  modified_base 29: mod_base = OTHER; note = 2'-O-methyl ribonucleotide
  modified_base 30: mod_base = OTHER; note = 2'-O-methyl ribonucleotide
  modified_base 31: mod_base = OTHER; note = 2'-O-methyl ribonucleotide
  modified_base 32: mod_base = OTHER; note = 2'-O-methyl ribonucleotide
  modified_base 34: mod_base = OTHER; note = 2'-O-methyl ribonucleotide
  modified_base 35: mod_base = OTHER; note = 2'-O-methyl ribonucleotide
  modified_base 36: mod_base = OTHER; note = 2'-O-methyl ribonucleotide
  modified_base 37: mod_base = OTHER; note = 2'-O-methyl ribonucleotide
  modified_base 38: mod_base = OTHER; note = 2'-O-methyl ribonucleotide
  modified_base 39: mod_base = OTHER; note = 2'-O-methyl ribonucleotide
  modified_base 40: mod_base = OTHER; note = 2'-O-methyl ribonucleotide
  modified_base 41: mod_base = OTHER; note = 2'-O-methyl ribonucleotide
  modified_base 42: mod_base = OTHER; note = 2'-O-methyl ribonucleotide
  modified_base 46: mod_base = OTHER; note = 2'-O-methyl ribonucleotide
  modified_base 48: mod_base = OTHER; note = 2'-O-methyl ribonucleotide
  modified_base 50: mod_base = OTHER; note = 2'-O-methyl ribonucleotide
  modified_base 52: mod_base = OTHER; note = 2'-O-methyl ribonucleotide
  modified_base 53: mod_base = OTHER; note = 2'-O-methyl ribonucleotide
  modified_base 54: mod_base = OTHER; note = 2'-O-methyl ribonucleotide
  modified_base 57: mod_base = OTHER; note = 2'-O-methyl ribonucleotide
  modified_base 61: mod_base = OTHER; note = 2'-O-methyl ribonucleotide
  modified_base 66: mod_base = OTHER; note = 2'-O-methyl ribonucleotide
  modified_base 67: mod_base = OTHER; note = 2'-O-methyl ribonucleotide
  modified_base 70: mod_base = OTHER; note = 2'-O-methyl ribonucleotide
  modified_base 71: mod_base = OTHER; note = 2'-O-methyl ribonucleotide
  modified_base 72: mod_base = OTHER; note = 2'-O-methyl ribonucleotide
  modified_base 73: mod_base = OTHER; note = 2'-O-methyl ribonucleotide
  modified_base 74: mod_base = OTHER; note = 2'-O-methyl ribonucleotide
  modified_base 75: mod_base = OTHER; note = 2'-O-methyl ribonucleotide
  modified_base 76: mod_base = OTHER; note = 2'-O-methyl ribonucleotide
  modified_base 77: mod_base = OTHER; note = 2'-O-methyl ribonucleotide
  modified_base 78: mod_base = OTHER; note = 2'-O-methyl ribonucleotide
  modified_base 79: mod_base = OTHER; note = 2'-O-methyl ribonucleotide
  modified_base 80: mod_base = OTHER; note = 2'-O-methyl ribonucleotide
  modified_base 82: mod_base = OTHER; note = 2'-O-methyl ribonucleotide
  modified_base 83: mod_base = OTHER; note = 2'-O-methyl ribonucleotide
  modified_base 84: mod_base = OTHER; note = 2'-O-methyl ribonucleotide
  modified_base 85: mod_base = OTHER; note = 2'-O-methyl ribonucleotide
  modified_base 86: mod_base = OTHER; note = 2'-O-methyl ribonucleotide
  modified_base 87: mod_base = OTHER; note = 2'-O-methyl ribonucleotide
  modified_base 89: mod_base = OTHER; note = 2'-O-methyl ribonucleotide
  modified_base 91: mod_base = OTHER; note = 2'-O-methyl ribonucleotide
  modified_base 92: mod_base = OTHER; note = 2'-O-methyl ribonucleotide
  modified_base 93: mod_base = OTHER; note = 2'-O-methyl ribonucleotide
  modified_base 94: mod_base = OTHER; note = 2'-O-methyl ribonucleotide
  modified_base 95: mod_base = OTHER; note = 2'-O-methyl ribonucleotide
  modified_base 96: mod_base = OTHER; note = 2'-O-methyl ribonucleotide
  modified_base 97: mod_base = OTHER; note = 2'-O-methyl ribonucleotide
  modified_base 98: mod_base = OTHER; note = 2'-O-methyl ribonucleotide
  modified_base 99: mod_base = OTHER; note = 2'-O-methyl ribonucleotide
  modified_base 100: mod_base = OTHER; note = 2'-O-methyl ribonucleotide
  modified_base 1..3: mod_base = OTHER; note = phosphorothioate linkage
  modified_base 25..26: mod_base = OTHER; note = phosphorothioate linkage
  modified_base 45..46: mod_base = OTHER; note = phosphorothioate linkage
  modified_base 98..100: mod_base = OTHER; note = phosphorothioate linkage

SEQ ID NO: 2773 - RNA, 103 nt, synthetic construct; identical to SEQ ID NO: 1700
  source 1..103: mol_type = other RNA
  modified_base 1: mod_base = OTHER; note = 2'-O-methyl ribonucleotide
  modified_base 2: mod_base = OTHER; note = 2'-O-methyl ribonucleotide
  modified_base 3: mod_base = OTHER; note = 2'-O-methyl ribonucleotide
  modified_base 21: mod_base = OTHER; note = 2'-O-methyl ribonucleotide
  modified_base 28: mod_base = OTHER; note = 2'-O-methyl ribonucleotide
  modified_base 29: mod_base = OTHER; note = 2'-O-methyl ribonucleotide
  modified_base 30: mod_base = OTHER; note = 2'-O-methyl ribonucleotide
  modified_base 31: mod_base = OTHER; note = 2'-O-methyl ribonucleotide
  modified_base 32: mod_base = OTHER; note = 2'-O-methyl ribonucleotide
  modified_base 34: mod_base = OTHER; note = 2'-O-methyl ribonucleotide
  modified_base 35: mod_base = OTHER; note = 2'-O-methyl ribonucleotide
  modified_base 36: mod_base = OTHER; note = 2'-O-methyl ribonucleotide
  modified_base 37: mod_base = OTHER; note = 2'-O-methyl ribonucleotide
  modified_base 38: mod_base = OTHER; note = 2'-O-methyl ribonucleotide
  modified_base 39: mod_base = OTHER; note = 2'-O-methyl ribonucleotide
  modified_base 40: mod_base = OTHER; note = 2'-O-methyl ribonucleotide
  modified_base 41: mod_base = OTHER; note = 2'-O-methyl ribonucleotide
  modified_base 42: mod_base = OTHER; note = 2'-O-methyl ribonucleotide
  modified_base 46: mod_base = OTHER; note = 2'-O-methyl ribonucleotide
  modified_base 48: mod_base = OTHER; note = 2'-O-methyl ribonucleotide
  modified_base 50: mod_base = OTHER; note = 2'-O-methyl ribonucleotide
  modified_base 52: mod_base = OTHER; note = 2'-O-methyl ribonucleotide
  modified_base 53: mod_base = OTHER; note = 2'-O-methyl ribonucleotide
  modified_base 54: mod_base = OTHER; note = 2'-O-methyl ribonucleotide
  modified_base 55: mod_base = OTHER; note = 2'-O-methyl ribonucleotide
  modified_base 56: mod_base = OTHER; note = 2'-O-methyl ribonucleotide
  modified_base 57: mod_base = OTHER; note = 2'-O-methyl ribonucleotide
  modified_base 60: mod_base = OTHER; note = 2'-O-methyl ribonucleotide
  modified_base 61: mod_base = OTHER; note = 2'-O-methyl ribonucleotide
  modified_base 66: mod_base = OTHER; note = 2'-O-methyl ribonucleotide
  modified_base 67: mod_base = OTHER; note = 2'-O-methyl ribonucleotide
  modified_base 70: mod_base = OTHER; note = 2'-O-methyl ribonucleotide
  modified_base 71: mod_base = OTHER; note = 2'-O-methyl ribonucleotide
  modified_base 72: mod_base = OTHER; note = 2'-O-methyl ribonucleotide
  modified_base 74: mod_base = OTHER; note = 2'-O-methyl ribonucleotide
  modified_base 75: mod_base = OTHER; note = 2'-O-methyl ribonucleotide
  modified_base 76: mod_base = OTHER; note = 2'-O-methyl ribonucleotide
  modified_base 77: mod_base = OTHER; note = 2'-O-methyl ribonucleotide
  modified_base 78: mod_base = OTHER; note = 2'-O-methyl ribonucleotide
  modified_base 79: mod_base = OTHER; note = 2'-O-methyl ribonucleotide
  modified_base 80: mod_base = OTHER; note = 2'-O-methyl ribonucleotide
  modified_base 82: mod_base = OTHER; note = 2'-O-methyl ribonucleotide
  modified_base 83: mod_base = OTHER; note = 2'-O-methyl ribonucleotide
  modified_base 84: mod_base = OTHER; note = 2'-O-methyl ribonucleotide
  modified_base 85: mod_base = OTHER; note = 2'-O-methyl ribonucleotide
  modified_base 86: mod_base = OTHER; note = 2'-O-methyl ribonucleotide
  modified_base 87: mod_base = OTHER; note = 2'-O-methyl ribonucleotide
  modified_base 89: mod_base = OTHER; note = 2'-O-methyl ribonucleotide
  modified_base 92: mod_base = OTHER; note = 2'-O-methyl ribonucleotide
  modified_base 93: mod_base = OTHER; note = 2'-O-methyl ribonucleotide
  modified_base 94: mod_base = OTHER; note = 2'-O-methyl ribonucleotide
  modified_base 95: mod_base = OTHER; note = 2'-O-methyl ribonucleotide
  modified_base 96: mod_base = OTHER; note = 2'-O-methyl ribonucleotide
  modified_base 97: mod_base = OTHER; note = 2'-O-methyl ribonucleotide
  modified_base 98: mod_base = OTHER; note = 2'-O-methyl ribonucleotide
  modified_base 99: mod_base = OTHER; note = 2'-O-methyl ribonucleotide
  modified_base 100: mod_base = OTHER; note = 2'-O-methyl ribonucleotide
  modified_base 1..3: mod_base = OTHER; note = phosphorothioate linkage
  modified_base 25..26: mod_base = OTHER; note = phosphorothioate linkage
  modified_base 45..46: mod_base = OTHER; note = phosphorothioate linkage
  modified_base 98..100: mod_base = OTHER; note = phosphorothioate linkage

SEQ ID NO: 2774 - RNA, 103 nt, synthetic construct; identical to SEQ ID NO: 1643
  source 1..103: mol_type = other RNA
  modified_base 1: mod_base = OTHER; note = 2'-O-methyl ribonucleotide
  modified_base 2: mod_base = OTHER; note = 2'-O-methyl ribonucleotide
  modified_base 3: mod_base = OTHER; note = 2'-O-methyl ribonucleotide
  modified_base 21: mod_base = OTHER; note = 2'-O-methyl ribonucleotide
  modified_base 28: mod_base = OTHER; note = 2'-O-methyl ribonucleotide
  modified_base 29: mod_base = OTHER; note = 2'-O-methyl ribonucleotide
  modified_base 30: mod_base = OTHER; note = 2'-O-methyl ribonucleotide
  modified_base 31: mod_base = OTHER; note = 2'-O-methyl ribonucleotide
  modified_base 32: mod_base = OTHER; note = 2'-O-methyl ribonucleotide
  modified_base 33: mod_base = OTHER; note = 2'-O-methyl ribonucleotide
  modified_base 34: mod_base = OTHER; note = 2'-O-methyl ribonucleotide
  modified_base 35: mod_base = OTHER; note = 2'-O-methyl ribonucleotide
  modified_base 36: mod_base = OTHER; note = 2'-O-methyl ribonucleotide
  modified_base 37: mod_base = OTHER; note = 2'-O-methyl ribonucleotide
  modified_base 38: mod_base = OTHER; note = 2'-O-methyl ribonucleotide
  modified_base 39: mod_base = OTHER; note = 2'-O-methyl ribonucleotide
  modified_base 40: mod_base = OTHER; note = 2'-O-methyl ribonucleotide
  modified_base 41: mod_base = OTHER; note = 2'-O-methyl ribonucleotide
  modified_base 42: mod_base = OTHER; note = 2'-O-methyl ribonucleotide
  modified_base 46: mod_base = OTHER; note = 2'-O-methyl ribonucleotide
  modified_base 48: mod_base = OTHER; note = 2'-O-methyl ribonucleotide
  modified_base 50: mod_base = OTHER; note = 2'-O-methyl ribonucleotide
  modified_base 52: mod_base = OTHER; note = 2'-O-methyl ribonucleotide
  modified_base 53: mod_base = OTHER; note = 2'-O-methyl ribonucleotide
  modified_base 54: mod_base = OTHER; note = 2'-O-methyl ribonucleotide
  modified_base 55: mod_base = OTHER; note = 2'-O-methyl ribonucleotide
  modified_base 56: mod_base = OTHER; note = 2'-O-methyl ribonucleotide
  modified_base 57: mod_base = OTHER; note = 2'-O-methyl ribonucleotide
  modified_base 60: mod_base = OTHER; note = 2'-O-methyl ribonucleotide
  modified_base 61: mod_base = OTHER; note = 2'-O-methyl ribonucleotide
  modified_base 66: mod_base = OTHER; note = 2'-O-methyl ribonucleotide
  modified_base 67: mod_base = OTHER; note = 2'-O-methyl ribonucleotide
  modified_base 70: mod_base = OTHER; note = 2'-O-methyl ribonucleotide
  modified_base 71: mod_base = OTHER; note = 2'-O-methyl ribonucleotide
  modified_base 72: mod_base = OTHER; note = 2'-O-methyl ribonucleotide
  modified_base 73: mod_base = OTHER; note = 2'-O-methyl ribonucleotide
  modified_base 74: mod_base = OTHER; note = 2'-O-methyl ribonucleotide
  modified_base 75: mod_base = OTHER; note = 2'-O-methyl ribonucleotide
  modified_base 76: mod_base = OTHER; note = 2'-O-methyl ribonucleotide
  modified_base 77: mod_base = OTHER; note = 2'-O-methyl ribonucleotide
  modified_base 78: mod_base = OTHER; note = 2'-O-methyl ribonucleotide
  modified_base 79: mod_base = OTHER; note = 2'-O-methyl ribonucleotide
  modified_base 80: mod_base = OTHER; note = 2'-O-methyl ribonucleotide
  modified_base 81: mod_base = OTHER; note = 2'-O-methyl ribonucleotide
  modified_base 83: mod_base = OTHER; note = 2'-O-methyl ribonucleotide
  modified_base 84: mod_base = OTHER; note = 2'-O-methyl ribonucleotide
  modified_base 85: mod_base = OTHER; note = 2'-O-methyl ribonucleotide
  modified_base 86: mod_base = OTHER; note = 2'-O-methyl ribonucleotide
  modified_base 87: mod_base = OTHER; note = 2'-O-methyl ribonucleotide
  modified_base 88: mod_base = OTHER; note = 2'-O-methyl ribonucleotide
  modified_base 89: mod_base = OTHER; note = 2'-O-methyl ribonucleotide
  modified_base 90: mod_base = OTHER; note = 2'-O-methyl ribonucleotide
  modified_base 91: mod_base = OTHER; note = 2'-O-methyl ribonucleotide
  modified_base 92: mod_base = OTHER; note = 2'-O-methyl ribonucleotide
  modified_base 93: mod_base = OTHER; note = 2'-O-methyl ribonucleotide
  modified_base 94: mod_base = OTHER; note = 2'-O-methyl ribonucleotide
  modified_base 95: mod_base = OTHER; note = 2'-O-methyl ribonucleotide
  modified_base 96: mod_base = OTHER; note = 2'-O-methyl ribonucleotide
  modified_base 97: mod_base = OTHER; note = 2'-O-methyl ribonucleotide
  modified_base 98: mod_base = OTHER; note = 2'-O-methyl ribonucleotide
  modified_base 99: mod_base = OTHER; note = 2'-O-methyl ribonucleotide
  modified_base 100: mod_base = OTHER; note = 2'-O-methyl ribonucleotide
  modified_base 1..3: mod_base = OTHER; note = phosphorothioate linkage
  modified_base 25..26: mod_base = OTHER; note = phosphorothioate linkage
  modified_base 64..65: mod_base = OTHER; note = phosphorothioate linkage
  modified_base 98..100: mod_base = OTHER; note = phosphorothioate linkage

SEQ ID NO: 2775 - RNA, 103 nt, synthetic construct; identical to SEQ ID NO: 1643
  source 1..103: mol_type = other RNA
  modified_base 1: mod_base = OTHER; note = 2'-O-methyl ribonucleotide
  modified_base 2: mod_base = OTHER; note = 2'-O-methyl ribonucleotide
  modified_base 3: mod_base = OTHER; note = 2'-O-methyl ribonucleotide
  modified_base 21: mod_base = OTHER; note = 2'-O-methyl ribonucleotide
  modified_base 28: mod_base = OTHER; note = 2'-O-methyl ribonucleotide
  modified_base 29: mod_base = OTHER; note = 2'-O-methyl ribonucleotide
  modified_base 30: mod_base = OTHER; note = 2'-O-methyl ribonucleotide
  modified_base 31: mod_base = OTHER; note = 2'-O-methyl ribonucleotide
  modified_base 32: mod_base = OTHER; note = 2'-O-methyl ribonucleotide
  modified_base 34: mod_base = OTHER; note = 2'-O-methyl ribonucleotide
  modified_base 35: mod_base = OTHER; note = 2'-O-methyl ribonucleotide
  modified_base 36: mod_base = OTHER; note = 2'-O-methyl ribonucleotide
  modified_base 37: mod_base = OTHER; note = 2'-O-methyl ribonucleotide
  modified_base 38: mod_base = OTHER; note = 2'-O-methyl ribonucleotide
  modified_base 39: mod_base = OTHER; note = 2'-O-methyl ribonucleotide
  modified_base 40: mod_base = OTHER; note = 2'-O-methyl ribonucleotide
  modified_base 41: mod_base = OTHER; note = 2'-O-methyl ribonucleotide
  modified_base 42: mod_base = OTHER; note = 2'-O-methyl ribonucleotide
  modified_base 46: mod_base = OTHER; note = 2'-O-methyl ribonucleotide
  modified_base 48: mod_base = OTHER; note = 2'-O-methyl ribonucleotide
  modified_base 50: mod_base = OTHER; note = 2'-O-methyl ribonucleotide
  modified_base 52: mod_base = OTHER; note = 2'-O-methyl ribonucleotide
  modified_base 53: mod_base = OTHER; note = 2'-O-methyl ribonucleotide
  modified_base 54: mod_base = OTHER; note = 2'-O-methyl ribonucleotide
  modified_base 55: mod_base = OTHER; note = 2'-O-methyl ribonucleotide
  modified_base 56: mod_base = OTHER; note = 2'-O-methyl ribonucleotide
  modified_base 57: mod_base = OTHER; note = 2'-O-methyl ribonucleotide
  modified_base 60: mod_base = OTHER; note = 2'-O-methyl ribonucleotide
  modified_base 61: mod_base = OTHER; note = 2'-O-methyl ribonucleotide
  modified_base 66: mod_base = OTHER; note = 2'-O-methyl ribonucleotide
  modified_base 67: mod_base = OTHER; note = 2'-O-methyl ribonucleotide
  modified_base 70: mod_base = OTHER; note = 2'-O-methyl ribonucleotide
  modified_base 71: mod_base = OTHER; note = 2'-O-methyl ribonucleotide
  modified_base 72: mod_base = OTHER; note = 2'-O-methyl ribonucleotide
  modified_base 74: mod_base = OTHER; note = 2'-O-methyl ribonucleotide
  modified_base 75: mod_base = OTHER; note = 2'-O-methyl ribonucleotide
  modified_base 76: mod_base = OTHER; note = 2'-O-methyl ribonucleotide
  modified_base 77: mod_base = OTHER; note = 2'-O-methyl ribonucleotide
  modified_base 78: mod_base = OTHER; note = 2'-O-methyl ribonucleotide
  modified_base 79: mod_base = OTHER; note = 2'-O-methyl ribonucleotide
  modified_base 80: mod_base = OTHER; note = 2'-O-methyl ribonucleotide
  modified_base 81: mod_base = OTHER; note = 2'-O-methyl ribonucleotide
  modified_base 83: mod_base = OTHER; note = 2'-O-methyl ribonucleotide
  modified_base 84: mod_base = OTHER; note = 2'-O-methyl ribonucleotide
  modified_base 85: mod_base = OTHER; note = 2'-O-methyl ribonucleotide
  modified_base 86: mod_base = OTHER; note = 2'-O-methyl ribonucleotide
  modified_base 87: mod_base = OTHER; note = 2'-O-methyl ribonucleotide
  modified_base 88: mod_base = OTHER; note = 2'-O-methyl ribonucleotide
  modified_base 89: mod_base = OTHER; note = 2'-O-methyl ribonucleotide
  modified_base 90: mod_base = OTHER; note = 2'-O-methyl ribonucleotide
  modified_base 91: mod_base = OTHER; note = 2'-O-methyl ribonucleotide
  modified_base 92: mod_base = OTHER; note = 2'-O-methyl ribonucleotide
  modified_base 93: mod_base = OTHER; note = 2'-O-methyl ribonucleotide
  modified_base 94: mod_base = OTHER; note = 2'-O-methyl ribonucleotide
  modified_base 95: mod_base = OTHER; note = 2'-O-methyl ribonucleotide
  modified_base 96: mod_base = OTHER; note = 2'-O-methyl ribonucleotide
  modified_base 97: mod_base = OTHER; note = 2'-O-methyl ribonucleotide
  modified_base 98: mod_base = OTHER; note = 2'-O-methyl ribonucleotide
  modified_base 99: mod_base = OTHER; note = 2'-O-methyl ribonucleotide
  modified_base 100: mod_base = OTHER; note = 2'-O-methyl ribonucleotide
  modified_base 1..3: mod_base = OTHER; note = phosphorothioate linkage
  modified_base 25..26: mod_base = OTHER; note = phosphorothioate linkage
  modified_base 64..65: mod_base = OTHER; note = phosphorothioate linkage
  modified_base 98..100: mod_base = OTHER; note = phosphorothioate linkage

SEQ ID NO: 2776 - RNA, 103 nt, synthetic construct; identical to SEQ ID NO: 1699
  source 1..103: mol_type = other RNA
  modified_base 1: mod_base = OTHER; note = 2'-O-methyl ribonucleotide
  modified_base 2: mod_base = OTHER; note = 2'-O-methyl ribonucleotide
  modified_base 3: mod_base = OTHER; note = 2'-O-methyl ribonucleotide
  modified_base 21: mod_base = OTHER; note = 2'-O-methyl ribonucleotide
  modified_base 28: mod_base = OTHER; note = 2'-O-methyl ribonucleotide
  modified_base 29: mod_base = OTHER; note = 2'-O-methyl ribonucleotide
  modified_base 30: mod_base = OTHER; note = 2'-O-methyl ribonucleotide
  modified_base 31: mod_base = OTHER; note = 2'-O-methyl ribonucleotide
  modified_base 32: mod_base = OTHER; note = 2'-O-methyl ribonucleotide
  modified_base 33: mod_base = OTHER; note = 2'-O-methyl ribonucleotide
  modified_base 34: mod_base = OTHER; note = 2'-O-methyl ribonucleotide
  modified_base 35: mod_base = OTHER; note = 2'-O-methyl ribonucleotide
  modified_base 36: mod_base = OTHER; note = 2'-O-methyl ribonucleotide
  modified_base 37: mod_base = OTHER; note = 2'-O-methyl ribonucleotide
  modified_base 38: mod_base = OTHER; note = 2'-O-methyl ribonucleotide
  modified_base 39: mod_base = OTHER; note = 2'-O-methyl ribonucleotide
  modified_base 40: mod_base = OTHER; note = 2'-O-methyl ribonucleotide
  modified_base 41: mod_base = OTHER; note = 2'-O-methyl ribonucleotide
  modified_base 42: mod_base = OTHER; note = 2'-O-methyl ribonucleotide
  modified_base 46: mod_base = OTHER; note = 2'-O-methyl ribonucleotide
  modified_base 48: mod_base = OTHER; note = 2'-O-methyl ribonucleotide
  modified_base 50: mod_base = OTHER; note = 2'-O-methyl ribonucleotide
  modified_base 52: mod_base = OTHER; note = 2'-O-methyl ribonucleotide
  modified_base 53: mod_base = OTHER; note = 2'-O-methyl ribonucleotide
  modified_base 54: mod_base = OTHER; note = 2'-O-methyl ribonucleotide
  modified_base 55: mod_base = OTHER; note = 2'-O-methyl ribonucleotide
  modified_base 56: mod_base = OTHER; note = 2'-O-methyl ribonucleotide
  modified_base 57: mod_base = OTHER; note = 2'-O-methyl ribonucleotide
  modified_base 60: mod_base = OTHER; note = 2'-O-methyl ribonucleotide
  modified_base 61: mod_base = OTHER; note = 2'-O-methyl ribonucleotide
  modified_base 66: mod_base = OTHER; note = 2'-O-methyl ribonucleotide
  modified_base 67: mod_base = OTHER; note = 2'-O-methyl ribonucleotide
  modified_base 70: mod_base = OTHER; note = 2'-O-methyl ribonucleotide
  modified_base 71: mod_base = OTHER; note = 2'-O-methyl ribonucleotide
  modified_base 72: mod_base = OTHER; note = 2'-O-methyl ribonucleotide
  modified_base 73: mod_base = OTHER; note = 2'-O-methyl ribonucleotide
  modified_base 74: mod_base = OTHER; note = 2'-O-methyl ribonucleotide
  modified_base 75: mod_base = OTHER; note = 2'-O-methyl ribonucleotide
  modified_base 76: mod_base = OTHER; note = 2'-O-methyl ribonucleotide
  modified_base 77: mod_base = OTHER; note = 2'-O-methyl ribonucleotide
  modified_base 78: mod_base = OTHER; note = 2'-O-methyl ribonucleotide
  modified_base 79: mod_base = OTHER; note = 2'-O-methyl ribonucleotide
  modified_base 80: mod_base = OTHER; note = 2'-O-methyl ribonucleotide
  modified_base 81: mod_base = OTHER; note = 2'-O-methyl ribonucleotide
  modified_base 83: mod_base = OTHER; note = 2'-O-methyl ribonucleotide
  modified_base 84: mod_base = OTHER; note = 2'-O-methyl ribonucleotide
  modified_base 85: mod_base = OTHER; note = 2'-O-methyl ribonucleotide
  modified_base 86: mod_base = OTHER; note = 2'-O-methyl ribonucleotide
  modified_base 87: mod_base = OTHER; note = 2'-O-methyl ribonucleotide
  modified_base 88: mod_base = OTHER; note = 2'-O-methyl ribonucleotide
  modified_base 89: mod_base = OTHER; note = 2'-O-methyl ribonucleotide
  modified_base 90: mod_base = OTHER; note = 2'-O-methyl ribonucleotide
  modified_base 91: mod_base = OTHER; note = 2'-O-methyl ribonucleotide
  modified_base 92: mod_base = OTHER; note = 2'-O-methyl ribonucleotide
  modified_base 93: mod_base = OTHER; note = 2'-O-methyl ribonucleotide
  modified_base 94: mod_base = OTHER; note = 2'-O-methyl ribonucleotide
  modified_base 95: mod_base = OTHER; note = 2'-O-methyl ribonucleotide
  modified_base 96: mod_base = OTHER; note = 2'-O-methyl ribonucleotide
  modified_base 97: mod_base = OTHER; note = 2'-O-methyl ribonucleotide
  modified_base 98: mod_base = OTHER; note = 2'-O-methyl ribonucleotide
  modified_base 99: mod_base = OTHER; note = 2'-O-methyl ribonucleotide
  modified_base 100: mod_base = OTHER; note = 2'-O-methyl ribonucleotide
  modified_base 1..3: mod_base = OTHER; note = phosphorothioate linkage
  modified_base 25..26: mod_base = OTHER; note = phosphorothioate linkage
  modified_base 64..65: mod_base = OTHER; note = phosphorothioate linkage
  modified_base 98..100: mod_base = OTHER; note = phosphorothioate linkage

SEQ ID NO: 2777 - RNA, 103 nt, synthetic construct; identical to SEQ ID NO: 1699
  source 1..103: mol_type = other RNA
  modified_base 1: mod_base = OTHER; note = 2'-O-methyl ribonucleotide
  modified_base 2: mod_base = OTHER; note = 2'-O-methyl ribonucleotide
  modified_base 3: mod_base = OTHER; note = 2'-O-methyl ribonucleotide
  modified_base 21: mod_base = OTHER; note = 2'-O-methyl ribonucleotide
  modified_base 28: mod_base = OTHER; note = 2'-O-methyl ribonucleotide
  modified_base 29: mod_base = OTHER; note = 2'-O-methyl ribonucleotide
  modified_base 30: mod_base = OTHER; note = 2'-O-methyl ribonucleotide
  modified_base 31: mod_base = OTHER; note = 2'-O-methyl ribonucleotide
  modified_base 32: mod_base = OTHER; note = 2'-O-methyl ribonucleotide
  modified_base 34: mod_base = OTHER; note = 2'-O-methyl ribonucleotide
  modified_base 35: mod_base = OTHER; note = 2'-O-methyl ribonucleotide
  modified_base 36: mod_base = OTHER; note = 2'-O-methyl ribonucleotide
  modified_base 37: mod_base = OTHER; note = 2'-O-methyl ribonucleotide
  modified_base 38: mod_base = OTHER; note = 2'-O-methyl ribonucleotide
  modified_base 39: mod_base = OTHER; note = 2'-O-methyl ribonucleotide
  modified_base 40: mod_base = OTHER; note = 2'-O-methyl ribonucleotide
  modified_base 41: mod_base = OTHER; note = 2'-O-methyl ribonucleotide
  modified_base 42: mod_base = OTHER; note = 2'-O-methyl ribonucleotide
  modified_base 46: mod_base = OTHER; note = 2'-O-methyl ribonucleotide
  modified_base 48: mod_base = OTHER; note = 2'-O-methyl ribonucleotide
  modified_base 50: mod_base = OTHER; note = 2'-O-methyl ribonucleotide
  modified_base 52: mod_base = OTHER; note = 2'-O-methyl ribonucleotide
  modified_base 53: mod_base = OTHER; note = 2'-O-methyl ribonucleotide
  modified_base 54: mod_base = OTHER; note = 2'-O-methyl ribonucleotide
  modified_base 55: mod_base = OTHER; note = 2'-O-methyl ribonucleotide
  modified_base 56: mod_base = OTHER; note = 2'-O-methyl ribonucleotide
  modified_base 57: mod_base = OTHER; note = 2'-O-methyl ribonucleotide
  modified_base 60: mod_base = OTHER; note = 2'-O-methyl ribonucleotide
  modified_base 61: mod_base = OTHER; note = 2'-O-methyl ribonucleotide
  modified_base 66: mod_base = OTHER; note = 2'-O-methyl ribonucleotide
  modified_base 67: mod_base = OTHER; note = 2'-O-methyl ribonucleotide
  modified_base 70: mod_base = OTHER; note = 2'-O-methyl ribonucleotide
  modified_base 71: mod_base = OTHER; note = 2'-O-methyl ribonucleotide
  modified_base 72: mod_base = OTHER; note = 2'-O-methyl ribonucleotide
  modified_base 74: mod_base = OTHER; note = 2'-O-methyl ribonucleotide
  modified_base 75: mod_base = OTHER; note = 2'-O-methyl ribonucleotide
  modified_base 76: mod_base = OTHER; note = 2'-O-methyl ribonucleotide
  modified_base 77: mod_base = OTHER; note = 2'-O-methyl ribonucleotide
  modified_base 78: mod_base = OTHER; note = 2'-O-methyl ribonucleotide
  modified_base 79: mod_base = OTHER; note = 2'-O-methyl ribonucleotide
  modified_base 80: mod_base = OTHER; note = 2'-O-methyl ribonucleotide
  modified_base 81: mod_base = OTHER; note = 2'-O-methyl ribonucleotide
  modified_base 83: mod_base = OTHER; note = 2'-O-methyl ribonucleotide
  modified_base 84: mod_base = OTHER; note = 2'-O-methyl ribonucleotide
  modified_base 85: mod_base = OTHER; note = 2'-O-methyl ribonucleotide
  modified_base 86: mod_base = OTHER; note = 2'-O-methyl ribonucleotide
  modified_base 87: mod_base = OTHER; note = 2'-O-methyl ribonucleotide
  modified_base 88: mod_base = OTHER; note = 2'-O-methyl ribonucleotide
  modified_base 89: mod_base = OTHER; note = 2'-O-methyl ribonucleotide
  modified_base 90: mod_base = OTHER; note = 2'-O-methyl ribonucleotide
  modified_base 91: mod_base = OTHER; note = 2'-O-methyl ribonucleotide
  modified_base 92: mod_base = OTHER; note = 2'-O-methyl ribonucleotide
  modified_base 93: mod_base = OTHER; note = 2'-O-methyl ribonucleotide
  modified_base 94: mod_base = OTHER; note = 2'-O-methyl ribonucleotide
  modified_base 95: mod_base = OTHER; note = 2'-O-methyl ribonucleotide
  modified_base 96: mod_base = OTHER; note = 2'-O-methyl ribonucleotide
  modified_base 97: mod_base = OTHER; note = 2'-O-methyl ribonucleotide
  modified_base 98: mod_base = OTHER; note = 2'-O-methyl ribonucleotide
  modified_base 99: mod_base = OTHER; note = 2'-O-methyl ribonucleotide
  modified_base 100: mod_base = OTHER; note = 2'-O-methyl ribonucleotide
  modified_base 1..3: mod_base = OTHER; note = phosphorothioate linkage
  modified_base 25..26: mod_base = OTHER; note = phosphorothioate linkage
  modified_base 64..65: mod_base = OTHER; note = phosphorothioate linkage
  modified_base 98..100: mod_base = OTHER; note = phosphorothioate linkage

SEQ ID NO: 2778 - RNA, 103 nt, synthetic construct; identical to SEQ ID NO: 1700
  source 1..103: mol_type = other RNA
  modified_base 1: mod_base = OTHER; note = 2'-O-methyl ribonucleotide
  modified_base 2: mod_base = OTHER; note = 2'-O-methyl ribonucleotide
  modified_base 3: mod_base = OTHER; note = 2'-O-methyl ribonucleotide
  modified_base 21: mod_base = OTHER; note = 2'-O-methyl ribonucleotide
  modified_base 28: mod_base = OTHER; note = 2'-O-methyl ribonucleotide
  modified_base 29: mod_base = OTHER; note = 2'-O-methyl ribonucleotide
  modified_base 30: mod_base = OTHER; note = 2'-O-methyl ribonucleotide
  modified_base 31: mod_base = OTHER; note = 2'-O-methyl ribonucleotide
  modified_base 32: mod_base = OTHER; note = 2'-O-methyl ribonucleotide
  modified_base 33: mod_base = OTHER; note = 2'-O-methyl ribonucleotide
  modified_base 34: mod_base = OTHER; note = 2'-O-methyl ribonucleotide
  modified_base 35: mod_base = OTHER; note = 2'-O-methyl ribonucleotide
  modified_base 36: mod_base = OTHER; note = 2'-O-methyl ribonucleotide
  modified_base 37: mod_base = OTHER; note = 2'-O-methyl ribonucleotide
  modified_base 38: mod_base = OTHER; note = 2'-O-methyl ribonucleotide
  modified_base 39: mod_base = OTHER; note = 2'-O-methyl ribonucleotide
  modified_base 40: mod_base = OTHER; note = 2'-O-methyl ribonucleotide
  modified_base 41: mod_base = OTHER; note = 2'-O-methyl ribonucleotide
  modified_base 42: mod_base = OTHER; note = 2'-O-methyl ribonucleotide
  modified_base 46: mod_base = OTHER; note = 2'-O-methyl ribonucleotide
  modified_base 48: mod_base = OTHER; note = 2'-O-methyl ribonucleotide
  modified_base 50: mod_base = OTHER; note = 2'-O-methyl ribonucleotide
  modified_base 52: mod_base = OTHER; note = 2'-O-methyl ribonucleotide
  modified_base 53: mod_base = OTHER; note = 2'-O-methyl ribonucleotide
  modified_base 54: mod_base = OTHER; note = 2'-O-methyl ribonucleotide
  modified_base 57: mod_base = OTHER; note = 2'-O-methyl ribonucleotide
  modified_base 61: mod_base = OTHER; note = 2'-O-methyl ribonucleotide
  modified_base 66: mod_base = OTHER; note = 2'-O-methyl ribonucleotide
  modified_base 67: mod_base = OTHER; note = 2'-O-methyl ribonucleotide
  modified_base 70: mod_base = OTHER; note = 2'-O-methyl ribonucleotide
  modified_base 71: mod_base = OTHER; note = 2'-O-methyl ribonucleotide
  modified_base 72: mod_base = OTHER; note = 2'-O-methyl ribonucleotide
  modified_base 74: mod_base = OTHER; note = 2'-O-methyl ribonucleotide
  modified_base 75: mod_base = OTHER; note = 2'-O-methyl ribonucleotide
  modified_base 76: mod_base = OTHER; note = 2'-O-methyl ribonucleotide
  modified_base 77: mod_base = OTHER; note = 2'-O-methyl ribonucleotide
  modified_base 78: mod_base = OTHER; note = 2'-O-methyl ribonucleotide
  modified_base 79: mod_base = OTHER; note = 2'-O-methyl ribonucleotide
  modified_base 80: mod_base = OTHER; note = 2'-O-methyl ribonucleotide
  modified_base 82: mod_base = OTHER; note = 2'-O-methyl ribonucleotide
  modified_base 83: mod_base = OTHER; note = 2'-O-methyl ribonucleotide
  modified_base 84: mod_base = OTHER; note = 2'-O-methyl ribonucleotide
  modified_base 85: mod_base = OTHER; note = 2'-O-methyl ribonucleotide
  modified_base 86: mod_base = OTHER; note = 2'-O-methyl ribonucleotide
  modified_base 87: mod_base = OTHER; note = 2'-O-methyl ribonucleotide
  modified_base 89: mod_base = OTHER; note = 2'-O-methyl ribonucleotide
  modified_base 92: mod_base = OTHER; note = 2'-O-methyl ribonucleotide
  modified_base 93: mod_base = OTHER; note = 2'-O-methyl ribonucleotide
  modified_base 94: mod_base = OTHER; note = 2'-O-methyl ribonucleotide
  modified_base 95: mod_base = OTHER; note = 2'-O-methyl ribonucleotide
  modified_base 96: mod_base = OTHER; note = 2'-O-methyl ribonucleotide
  modified_base 97: mod_base = OTHER; note = 2'-O-methyl ribonucleotide
  modified_base 98: mod_base = OTHER; note = 2'-O-methyl ribonucleotide
  modified_base 99: mod_base = OTHER; note = 2'-O-methyl ribonucleotide
  modified_base 100: mod_base = OTHER; note = 2'-O-methyl ribonucleotide
  modified_base 1..3: mod_base = OTHER; note = phosphorothioate linkage
  modified_base 25..26: mod_base = OTHER; note = phosphorothioate linkage
  modified_base 64..65: mod_base = OTHER; note = phosphorothioate linkage
  modified_base 98..100: mod_base = OTHER; note = phosphorothioate linkage

SEQ ID NO: 2779 - RNA, 103 nt, synthetic construct; identical to SEQ ID NO: 1700
  source 1..103: mol_type = other RNA
  modified_base 1: mod_base = OTHER; note = 2'-O-methyl ribonucleotide
  modified_base 2: mod_base = OTHER; note = 2'-O-methyl ribonucleotide
  modified_base 3: mod_base = OTHER; note = 2'-O-methyl ribonucleotide
  modified_base 21: mod_base = OTHER; note = 2'-O-methyl ribonucleotide
  modified_base 28: mod_base = OTHER; note = 2'-O-methyl ribonucleotide
  modified_base 29: mod_base = OTHER; note = 2'-O-methyl ribonucleotide
  modified_base 30: mod_base = OTHER; note = 2'-O-methyl ribonucleotide
  modified_base 31: mod_base = OTHER; note = 2'-O-methyl ribonucleotide
  modified_base 32: mod_base = OTHER; note = 2'-O-methyl ribonucleotide
  modified_base 33: mod_base = OTHER; note = 2'-O-methyl ribonucleotide
  modified_base 34: mod_base = OTHER; note = 2'-O-methyl ribonucleotide
  modified_base 35: mod_base = OTHER; note = 2'-O-methyl ribonucleotide
  modified_base 36: mod_base = OTHER; note = 2'-O-methyl ribonucleotide
  modified_base 37: mod_base = OTHER; note = 2'-O-methyl ribonucleotide
  modified_base 38: mod_base = OTHER; note = 2'-O-methyl ribonucleotide
  modified_base 39: mod_base = OTHER; note = 2'-O-methyl ribonucleotide
  modified_base 40: mod_base = OTHER; note = 2'-O-methyl ribonucleotide
  modified_base 41: mod_base = OTHER; note = 2'-O-methyl ribonucleotide
  modified_base 42: mod_base = OTHER; note = 2'-O-methyl ribonucleotide
  modified_base 46: mod_base = OTHER; note = 2'-O-methyl ribonucleotide
  modified_base 48: mod_base = OTHER; note = 2'-O-methyl ribonucleotide
  modified_base 50: mod_base = OTHER; note = 2'-O-methyl ribonucleotide
  modified_base 52: mod_base = OTHER; note = 2'-O-methyl ribonucleotide
  modified_base 53: mod_base = OTHER; note = 2'-O-methyl ribonucleotide
  modified_base 54: mod_base = OTHER; note = 2'-O-methyl ribonucleotide
  modified_base 55: mod_base = OTHER; note = 2'-O-methyl ribonucleotide
  modified_base 56: mod_base = OTHER; note = 2'-O-methyl ribonucleotide
  modified_base 57: mod_base = OTHER; note = 2'-O-methyl ribonucleotide
  modified_base 60: mod_base = OTHER; note = 2'-O-methyl ribonucleotide
  modified_base 61: mod_base = OTHER; note = 2'-O-methyl ribonucleotide
  modified_base 66: mod_base = OTHER; note = 2'-O-methyl ribonucleotide
  modified_base 67: mod_base = OTHER; note = 2'-O-methyl ribonucleotide
  modified_base 70: mod_base = OTHER; note = 2'-O-methyl ribonucleotide
  modified_base 71: mod_base = OTHER; note = 2'-O-methyl ribonucleotide
  modified_base 72: mod_base = OTHER; note = 2'-O-methyl ribonucleotide
  modified_base 74: mod_base = OTHER; note = 2'-O-methyl ribonucleotide
  modified_base 75: mod_base = OTHER; note = 2'-O-methyl ribonucleotide
  modified_base 76: mod_base = OTHER; note = 2'-O-methyl ribonucleotide
  modified_base 77: mod_base = OTHER; note = 2'-O-methyl ribonucleotide
  modified_base 78: mod_base = OTHER; note = 2'-O-methyl ribonucleotide
  modified_base 79: mod_base = OTHER; note = 2'-O-methyl ribonucleotide
  modified_base 80: mod_base = OTHER; note = 2'-O-methyl ribonucleotide
  modified_base 82: mod_base = OTHER; note = 2'-O-methyl ribonucleotide
  modified_base 83: mod_base = OTHER; note = 2'-O-methyl ribonucleotide
  modified_base 84: mod_base = OTHER; note = 2'-O-methyl ribonucleotide
  modified_base 85: mod_base = OTHER; note = 2'-O-methyl ribonucleotide
  modified_base 86: mod_base = OTHER; note = 2'-O-methyl ribonucleotide
  modified_base 87: mod_base = OTHER; note = 2'-O-methyl ribonucleotide
  modified_base 89: mod_base = OTHER; note = 2'-O-methyl ribonucleotide
  modified_base 92: mod_base = OTHER; note = 2'-O-methyl ribonucleotide
  modified_base 93: mod_base = OTHER; note = 2'-O-methyl ribonucleotide
  modified_base 94: mod_base = OTHER; note = 2'-O-methyl ribonucleotide
  modified_base 95: mod_base = OTHER; note = 2'-O-methyl ribonucleotide
  modified_base 96: mod_base = OTHER; note = 2'-O-methyl ribonucleotide
  modified_base 97: mod_base = OTHER; note = 2'-O-methyl ribonucleotide
  modified_base 98: mod_base = OTHER; note = 2'-O-methyl ribonucleotide
  modified_base 99: mod_base = OTHER; note = 2'-O-methyl ribonucleotide
  modified_base 100: mod_base = OTHER; note = 2'-O-methyl ribonucleotide
  modified_base 1..3: mod_base = OTHER; note = phosphorothioate linkage
  modified_base 25..26: mod_base = OTHER; note = phosphorothioate linkage
  modified_base 64..65: mod_base = OTHER; note = phosphorothioate linkage
  modified_base 98..100: mod_base = OTHER; note = phosphorothioate linkage

SEQ ID NO: 2780 - RNA, 103 nt, synthetic construct; identical to SEQ ID NO: 1700
  source 1..103: mol_type = other RNA
  modified_base 1: mod_base = OTHER; note = 2'-O-methyl ribonucleotide
  modified_base 2: mod_base = OTHER; note = 2'-O-methyl ribonucleotide
  modified_base 3: mod_base = OTHER; note = 2'-O-methyl ribonucleotide
  modified_base 21: mod_base = OTHER; note = 2'-O-methyl ribonucleotide
  modified_base 28: mod_base = OTHER; note = 2'-O-methyl ribonucleotide
  modified_base 29: mod_base = OTHER; note = 2'-O-methyl ribonucleotide
  modified_base 30: mod_base = OTHER; note = 2'-O-methyl ribonucleotide
  modified_base 31: mod_base = OTHER; note = 2'-O-methyl ribonucleotide
  modified_base 32: mod_base = OTHER; note = 2'-O-methyl ribonucleotide
  modified_base 33: mod_base = OTHER; note = 2'-O-methyl ribonucleotide
  modified_base 34: mod_base = OTHER; note = 2'-O-methyl ribonucleotide
  modified_base 35: mod_base = OTHER; note = 2'-O-methyl ribonucleotide
  modified_base 36: mod_base = OTHER; note = 2'-O-methyl ribonucleotide
  modified_base 37: mod_base = OTHER; note = 2'-O-methyl ribonucleotide
  modified_base 38: mod_base = OTHER; note = 2'-O-methyl ribonucleotide
  modified_base 39: mod_base = OTHER; note = 2'-O-methyl ribonucleotide
  modified_base 40: mod_base = OTHER; note = 2'-O-methyl ribonucleotide
  modified_base 41: mod_base = OTHER; note = 2'-O-methyl ribonucleotide
  modified_base 42: mod_base = OTHER; note = 2'-O-methyl ribonucleotide
  modified_base 46: mod_base = OTHER; note = 2'-O-methyl ribonucleotide
  modified_base 48: mod_base = OTHER; note = 2'-O-methyl ribonucleotide
  modified_base 50: mod_base = OTHER; note = 2'-O-methyl ribonucleotide
  modified_base 52: mod_base = OTHER; note = 2'-O-methyl ribonucleotide
  modified_base 53: mod_base = OTHER; note = 2'-O-methyl ribonucleotide
  modified_base 54: mod_base = OTHER; note = 2'-O-methyl ribonucleotide
  modified_base 57: mod_base = OTHER; note = 2'-O-methyl ribonucleotide
  modified_base 61: mod_base = OTHER; note = 2'-O-methyl ribonucleotide
  modified_base 66: mod_base = OTHER; note = 2'-O-methyl ribonucleotide
  modified_base 67: mod_base = OTHER; note = 2'-O-methyl ribonucleotide
  modified_base 70: mod_base = OTHER; note = 2'-O-methyl ribonucleotide
  modified_base 71: mod_base = OTHER; note = 2'-O-methyl ribonucleotide
  modified_base 72: mod_base = OTHER; note = 2'-O-methyl ribonucleotide
  modified_base 73: mod_base = OTHER; note = 2'-O-methyl ribonucleotide
  modified_base 74: mod_base = OTHER; note = 2'-O-methyl ribonucleotide
  modified_base 75: mod_base = OTHER; note = 2'-O-methyl ribonucleotide
  modified_base 76: mod_base = OTHER; note = 2'-O-methyl ribonucleotide
  modified_base 77: mod_base = OTHER; note = 2'-O-methyl ribonucleotide
  modified_base 78: mod_base = OTHER; note = 2'-O-methyl ribonucleotide
  modified_base 79: mod_base = OTHER; note = 2'-O-methyl ribonucleotide
  modified_base 80: mod_base = OTHER; note = 2'-O-methyl ribonucleotide
  modified_base 82: mod_base = OTHER; note = 2'-O-methyl ribonucleotide
  modified_base 83: mod_base = OTHER; note = 2'-O-methyl ribonucleotide
  modified_base 84: mod_base = OTHER; note = 2'-O-methyl ribonucleotide
  modified_base 85: mod_base = OTHER; note = 2'-O-methyl ribonucleotide
  modified_base 86: mod_base = OTHER; note = 2'-O-methyl ribonucleotide
  modified_base 87: mod_base = OTHER; note = 2'-O-methyl ribonucleotide
  modified_base 89: mod_base = OTHER; note = 2'-O-methyl ribonucleotide
  modified_base 92: mod_base = OTHER; note = 2'-O-methyl ribonucleotide
  modified_base 93: mod_base = OTHER; note = 2'-O-methyl ribonucleotide
  modified_base 94: mod_base = OTHER; note = 2'-O-methyl ribonucleotide
  modified_base 95: mod_base = OTHER; note = 2'-O-methyl ribonucleotide
  modified_base 96: mod_base = OTHER; note = 2'-O-methyl ribonucleotide
  modified_base 97: mod_base = OTHER; note = 2'-O-methyl ribonucleotide
  modified_base 98: mod_base = OTHER; note = 2'-O-methyl ribonucleotide
  modified_base 99: mod_base = OTHER; note = 2'-O-methyl ribonucleotide
  modified_base 100: mod_base = OTHER; note = 2'-O-methyl ribonucleotide
  modified_base 1..3: mod_base = OTHER; note = phosphorothioate linkage
  modified_base 25..26: mod_base = OTHER; note = phosphorothioate linkage
  modified_base 64..65: mod_base = OTHER; note = phosphorothioate linkage
  modified_base 98..100: mod_base = OTHER; note = phosphorothioate linkage

SEQ ID NO: 2781 - RNA, 103 nt, synthetic construct; identical to SEQ ID NO: 1700
  source 1..103: mol_type = other RNA
  modified_base 1: mod_base = OTHER; note = 2'-O-methyl ribonucleotide
  modified_base 2: mod_base = OTHER; note = 2'-O-methyl ribonucleotide
  modified_base 3: mod_base = OTHER; note = 2'-O-methyl ribonucleotide
  modified_base 21: mod_base = OTHER; note = 2'-O-methyl ribonucleotide
  modified_base 28: mod_base = OTHER; note = 2'-O-methyl ribonucleotide
  modified_base 29: mod_base = OTHER; note = 2'-O-methyl ribonucleotide
  modified_base 30: mod_base = OTHER; note = 2'-O-methyl ribonucleotide
  modified_base 31: mod_base = OTHER; note = 2'-O-methyl ribonucleotide
  modified_base 32: mod_base = OTHER; note = 2'-O-methyl ribonucleotide
  modified_base 33: mod_base = OTHER; note = 2'-O-methyl ribonucleotide
  modified_base 34: mod_base = OTHER; note = 2'-O-methyl ribonucleotide
  modified_base 35: mod_base = OTHER; note = 2'-O-methyl ribonucleotide
  modified_base 36: mod_base = OTHER; note = 2'-O-methyl ribonucleotide
  modified_base 37: mod_base = OTHER; note = 2'-O-methyl ribonucleotide
  modified_base 38: mod_base = OTHER; note = 2'-O-methyl ribonucleotide
  modified_base 39: mod_base = OTHER; note = 2'-O-methyl ribonucleotide
  modified_base 40: mod_base = OTHER; note = 2'-O-methyl ribonucleotide
  modified_base 41: mod_base = OTHER; note = 2'-O-methyl ribonucleotide
  modified_base 42: mod_base = OTHER; note = 2'-O-methyl ribonucleotide
  modified_base 46: mod_base = OTHER; note = 2'-O-methyl ribonucleotide
  modified_base 48: mod_base = OTHER; note = 2'-O-methyl ribonucleotide
  modified_base 50: mod_base = OTHER; note = 2'-O-methyl ribonucleotide
  modified_base 52: mod_base = OTHER; note = 2'-O-methyl ribonucleotide
  modified_base 53: mod_base = OTHER; note = 2'-O-methyl ribonucleotide
  modified_base 54: mod_base = OTHER; note = 2'-O-methyl ribonucleotide
  modified_base 57: mod_base = OTHER; note = 2'-O-methyl ribonucleotide
  modified_base 61: mod_base = OTHER; note = 2'-O-methyl ribonucleotide
  modified_base 66: mod_base = OTHER; note = 2'-O-methyl ribonucleotide
  modified_base 67: mod_base = OTHER; note = 2'-O-methyl ribonucleotide
  modified_base 70: mod_base = OTHER; note = 2'-O-methyl ribonucleotide
  modified_base 71: mod_base = OTHER; note = 2'-O-methyl ribonucleotide
  modified_base 72: mod_base = OTHER; note = 2'-O-methyl ribonucleotide
  modified_base 73: mod_base = OTHER; note = 2'-O-methyl ribonucleotide
  modified_base 74: mod_base = OTHER; note = 2'-O-methyl ribonucleotide
  modified_base 75: mod_base = OTHER; note = 2'-O-methyl ribonucleotide
  modified_base 76: mod_base = OTHER; note = 2'-O-methyl ribonucleotide
  modified_base 77: mod_base = OTHER; note = 2'-O-methyl ribonucleotide
  modified_base 78: mod_base = OTHER; note = 2'-O-methyl ribonucleotide
  modified_base 79: mod_base = OTHER; note = 2'-O-methyl ribonucleotide
  modified_base 80: mod_base = OTHER; note = 2'-O-methyl ribonucleotide
  modified_base 82: mod_base = OTHER; note = 2'-O-methyl ribonucleotide
  modified_base 83: mod_base = OTHER; note = 2'-O-methyl ribonucleotide
  modified_base 84: mod_base = OTHER; note = 2'-O-methyl ribonucleotide
  modified_base 85: mod_base = OTHER; note = 2'-O-methyl ribonucleotide
  modified_base 86: mod_base = OTHER; note = 2'-O-methyl ribonucleotide
  modified_base 87: mod_base = OTHER; note = 2'-O-methyl ribonucleotide
  modified_base 89: mod_base = OTHER; note = 2'-O-methyl ribonucleotide
  modified_base 91: mod_base = OTHER; note = 2'-O-methyl ribonucleotide
  modified_base 92: mod_base = OTHER; note = 2'-O-methyl ribonucleotide
  modified_base 93: mod_base = OTHER; note = 2'-O-methyl ribonucleotide
  modified_base 94: mod_base = OTHER; note = 2'-O-methyl ribonucleotide
  modified_base 95: mod_base = OTHER; note = 2'-O-methyl ribonucleotide
  modified_base 96: mod_base = OTHER; note = 2'-O-methyl ribonucleotide
  modified_base 97: mod_base = OTHER; note = 2'-O-methyl ribonucleotide
  modified_base 98: mod_base = OTHER; note = 2'-O-methyl ribonucleotide
  modified_base 99: mod_base = OTHER; note = 2'-O-methyl ribonucleotide
  modified_base 100: mod_base = OTHER; note = 2'-O-methyl ribonucleotide
  modified_base 1..3: mod_base = OTHER; note = phosphorothioate linkage
  modified_base 25..26: mod_base = OTHER; note = phosphorothioate linkage
  modified_base 64..65: mod_base = OTHER; note = phosphorothioate linkage
  modified_base 98..100: mod_base = OTHER; note = phosphorothioate linkage

SEQ ID NO: 2782 - RNA, 103 nt, synthetic construct; identical to SEQ ID NO: 1700
  source 1..103: mol_type = other RNA
  modified_base 1: mod_base = OTHER; note = 2'-O-methyl ribonucleotide
  modified_base 2: mod_base = OTHER; note = 2'-O-methyl ribonucleotide
  modified_base 3: mod_base = OTHER; note = 2'-O-methyl ribonucleotide
  modified_base 21: mod_base = OTHER; note = 2'-O-methyl ribonucleotide
  modified_base 28: mod_base = OTHER; note = 2'-O-methyl ribonucleotide
  modified_base 29: mod_base = OTHER; note = 2'-O-methyl ribonucleotide
  modified_base 30: mod_base = OTHER; note = 2'-O-methyl ribonucleotide
  modified_base 31: mod_base = OTHER; note = 2'-O-methyl ribonucleotide
  modified_base 32: mod_base = OTHER; note = 2'-O-methyl ribonucleotide
  modified_base 34: mod_base = OTHER; note = 2'-O-methyl ribonucleotide
  modified_base 35: mod_base = OTHER; note = 2'-O-methyl ribonucleotide
  modified_base 36: mod_base = OTHER; note = 2'-O-methyl ribonucleotide
  modified_base 37: mod_base = OTHER; note = 2'-O-methyl ribonucleotide
  modified_base 38: mod_base = OTHER; note = 2'-O-methyl ribonucleotide
  modified_base 39: mod_base = OTHER; note = 2'-O-methyl ribonucleotide
  modified_base 40: mod_base = OTHER; note = 2'-O-methyl ribonucleotide
  modified_base 41: mod_base = OTHER; note = 2'-O-methyl ribonucleotide
  modified_base 42: mod_base = OTHER; note = 2'-O-methyl ribonucleotide
  modified_base 46: mod_base = OTHER; note = 2'-O-methyl ribonucleotide
  modified_base 48: mod_base = OTHER; note = 2'-O-methyl ribonucleotide
  modified_base 50: mod_base = OTHER; note = 2'-O-methyl ribonucleotide
  modified_base 52: mod_base = OTHER; note = 2'-O-methyl ribonucleotide
  modified_base 53: mod_base = OTHER; note = 2'-O-methyl ribonucleotide
  modified_base 54: mod_base = OTHER; note = 2'-O-methyl ribonucleotide
  modified_base 57: mod_base = OTHER; note = 2'-O-methyl ribonucleotide
  modified_base 61: mod_base = OTHER; note = 2'-O-methyl ribonucleotide
  modified_base 66: mod_base = OTHER; note = 2'-O-methyl ribonucleotide
  modified_base 67: mod_base = OTHER; note = 2'-O-methyl ribonucleotide
  modified_base 70: mod_base = OTHER; note = 2'-O-methyl ribonucleotide
  modified_base 71: mod_base = OTHER; note = 2'-O-methyl ribonucleotide
  modified_base 72: mod_base = OTHER; note = 2'-O-methyl ribonucleotide
  modified_base 73: mod_base = OTHER; note = 2'-O-methyl ribonucleotide
  modified_base 74: mod_base = OTHER; note = 2'-O-methyl ribonucleotide
  modified_base 75: mod_base = OTHER; note = 2'-O-methyl ribonucleotide
  modified_base 76: mod_base = OTHER; note = 2'-O-methyl ribonucleotide
  modified_base 77: mod_base = OTHER; note = 2'-O-methyl ribonucleotide
  modified_base 78: mod_base = OTHER; note = 2'-O-methyl ribonucleotide
  modified_base 79: mod_base = OTHER; note = 2'-O-methyl ribonucleotide
  modified_base 80: mod_base = OTHER; note = 2'-O-methyl ribonucleotide
  modified_base 82: mod_base = OTHER; note = 2'-O-methyl ribonucleotide
  modified_base 83: mod_base = OTHER; note = 2'-O-methyl ribonucleotide
  modified_base 84: mod_base = OTHER; note = 2'-O-methyl ribonucleotide
  modified_base 85: mod_base = OTHER; note = 2'-O-methyl ribonucleotide
  modified_base 86: mod_base = OTHER; note = 2'-O-methyl ribonucleotide
  modified_base 87: mod_base = OTHER; note = 2'-O-methyl ribonucleotide
  modified_base 89: mod_base = OTHER; note = 2'-O-methyl ribonucleotide
  modified_base 92: mod_base = OTHER; note = 2'-O-methyl ribonucleotide
  modified_base 93: mod_base = OTHER; note = 2'-O-methyl ribonucleotide
  modified_base 94: mod_base = OTHER; note = 2'-O-methyl ribonucleotide
  modified_base 95: mod_base = OTHER; note = 2'-O-methyl ribonucleotide
  modified_base 96: mod_base = OTHER; note = 2'-O-methyl ribonucleotide
  modified_base 97: mod_base = OTHER; note = 2'-O-methyl ribonucleotide
  modified_base 98: mod_base = OTHER; note = 2'-O-methyl ribonucleotide
  modified_base 99: mod_base = OTHER; note = 2'-O-methyl ribonucleotide
  modified_base 100: mod_base = OTHER; note = 2'-O-methyl ribonucleotide
  modified_base 1..3: mod_base = OTHER; note = phosphorothioate linkage
  modified_base 25..26: mod_base = OTHER; note = phosphorothioate linkage
  modified_base 64..65: mod_base = OTHER; note = phosphorothioate linkage
  modified_base 98..100: mod_base = OTHER; note = phosphorothioate linkage

SEQ ID NO: 2783 - RNA, 103 nt, synthetic construct; identical to SEQ ID NO: 1700
  source 1..103: mol_type = other RNA
  modified_base 1: mod_base = OTHER; note = 2'-O-methyl ribonucleotide
  modified_base 2: mod_base = OTHER; note = 2'-O-methyl ribonucleotide
  modified_base 3: mod_base = OTHER; note = 2'-O-methyl ribonucleotide
  modified_base 21: mod_base = OTHER; note = 2'-O-methyl ribonucleotide
  modified_base 28: mod_base = OTHER; note = 2'-O-methyl ribonucleotide
  modified_base 29: mod_base = OTHER; note = 2'-O-methyl ribonucleotide
  modified_base 30: mod_base = OTHER; note = 2'-O-methyl ribonucleotide
  modified_base 31: mod_base = OTHER; note = 2'-O-methyl ribonucleotide
  modified_base 32: mod_base = OTHER; note = 2'-O-methyl ribonucleotide
  modified_base 34: mod_base = OTHER; note = 2'-O-methyl ribonucleotide
  modified_base 35: mod_base = OTHER; note = 2'-O-methyl ribonucleotide
  modified_base 36: mod_base = OTHER; note = 2'-O-methyl ribonucleotide
  modified_base 37: mod_base = OTHER; note = 2'-O-methyl ribonucleotide
  modified_base 38: mod_base = OTHER; note = 2'-O-methyl ribonucleotide
  modified_base 39: mod_base = OTHER; note = 2'-O-methyl ribonucleotide
  modified_base 40: mod_base = OTHER; note = 2'-O-methyl ribonucleotide
  modified_base 41: mod_base = OTHER; note = 2'-O-methyl ribonucleotide
  modified_base 42: mod_base = OTHER; note = 2'-O-methyl ribonucleotide
  modified_base 46: mod_base = OTHER; note = 2'-O-methyl ribonucleotide
  modified_base 48: mod_base = OTHER; note = 2'-O-methyl ribonucleotide
  modified_base 50: mod_base = OTHER; note = 2'-O-methyl ribonucleotide
  modified_base 52: mod_base = OTHER; note = 2'-O-methyl ribonucleotide
  modified_base 53: mod_base = OTHER; note = 2'-O-methyl ribonucleotide
  modified_base 54: mod_base = OTHER; note = 2'-O-methyl ribonucleotide
  modified_base 57: mod_base = OTHER; note = 2'-O-methyl ribonucleotide
  modified_base 61: mod_base = OTHER; note = 2'-O-methyl ribonucleotide
  modified_base 66: mod_base = OTHER; note = 2'-O-methyl ribonucleotide
  modified_base 67: mod_base = OTHER; note = 2'-O-methyl ribonucleotide
  modified_base 70: mod_base = OTHER; note = 2'-O-methyl ribonucleotide
  modified_base 71: mod_base = OTHER; note = 2'-O-methyl ribonucleotide
  modified_base 72: mod_base = OTHER; note = 2'-O-methyl ribonucleotide
  modified_base 73: mod_base = OTHER; note = 2'-O-methyl ribonucleotide
  modified_base 74: mod_base = OTHER; note = 2'-O-methyl ribonucleotide
  modified_base 75: mod_base = OTHER; note = 2'-O-methyl ribonucleotide
  modified_base 76: mod_base = OTHER; note = 2'-O-methyl ribonucleotide
  modified_base 77: mod_base = OTHER; note = 2'-O-methyl ribonucleotide
  modified_base 78: mod_base = OTHER; note = 2'-O-methyl ribonucleotide
  modified_base 79: mod_base = OTHER; note = 2'-O-methyl ribonucleotide
  modified_base 80: mod_base = OTHER; note = 2'-O-methyl ribonucleotide
  modified_base 82: mod_base = OTHER; note = 2'-O-methyl ribonucleotide
  modified_base 83: mod_base = OTHER; note = 2'-O-methyl ribonucleotide
  modified_base 84: mod_base = OTHER; note = 2'-O-methyl ribonucleotide
  modified_base 85: mod_base = OTHER; note = 2'-O-methyl ribonucleotide
  modified_base 86: mod_base = OTHER; note = 2'-O-methyl ribonucleotide
  modified_base 87: mod_base = OTHER; note = 2'-O-methyl ribonucleotide
  modified_base 89: mod_base = OTHER; note = 2'-O-methyl ribonucleotide
  modified_base 91: mod_base = OTHER; note = 2'-O-methyl ribonucleotide
  modified_base 92: mod_base = OTHER; note = 2'-O-methyl ribonucleotide
  modified_base 93: mod_base = OTHER; note = 2'-O-methyl ribonucleotide
  modified_base 94: mod_base = OTHER; note = 2'-O-methyl ribonucleotide
  modified_base 95: mod_base = OTHER; note = 2'-O-methyl ribonucleotide
  modified_base 96: mod_base = OTHER; note = 2'-O-methyl ribonucleotide
  modified_base 97: mod_base = OTHER; note = 2'-O-methyl ribonucleotide
  modified_base 98: mod_base = OTHER; note = 2'-O-methyl ribonucleotide
  modified_base 99: mod_base = OTHER; note = 2'-O-methyl ribonucleotide
  modified_base 100: mod_base = OTHER; note = 2'-O-methyl ribonucleotide
  modified_base 1..3: mod_base = OTHER; note = phosphorothioate linkage
  modified_base 25..26: mod_base = OTHER; note = phosphorothioate linkage
  modified_base 64..65: mod_base = OTHER; note = phosphorothioate linkage
  modified_base 98..100: mod_base = OTHER; note = phosphorothioate linkage

SEQ ID NO: 2784 - RNA, 103 nt, synthetic construct; identical to SEQ ID NO: 1700
  source 1..103: mol_type = other RNA
  modified_base 1: mod_base = OTHER; note = 2'-O-methyl ribonucleotide
  modified_base 2: mod_base = OTHER; note = 2'-O-methyl ribonucleotide
  modified_base 3: mod_base = OTHER; note = 2'-O-methyl ribonucleotide
  modified_base 21: mod_base = OTHER; note = 2'-O-methyl ribonucleotide
  modified_base 28: mod_base = OTHER; note = 2'-O-methyl ribonucleotide
  modified_base 29: mod_base = OTHER; note = 2'-O-methyl ribonucleotide
  modified_base 30: mod_base = OTHER; note = 2'-O-methyl ribonucleotide
  modified_base 31: mod_base = OTHER; note = 2'-O-methyl ribonucleotide
  modified_base 32: mod_base = OTHER; note = 2'-O-methyl ribonucleotide
  modified_base 34: mod_base = OTHER; note = 2'-O-methyl ribonucleotide
  modified_base 35: mod_base = OTHER; note = 2'-O-methyl ribonucleotide
  modified_base 36: mod_base = OTHER; note = 2'-O-methyl ribonucleotide
  modified_base 37: mod_base = OTHER; note = 2'-O-methyl ribonucleotide
  modified_base 38: mod_base = OTHER; note = 2'-O-methyl ribonucleotide
  modified_base 39: mod_base = OTHER; note = 2'-O-methyl ribonucleotide
  modified_base 40: mod_base = OTHER; note = 2'-O-methyl ribonucleotide
  modified_base 41: mod_base = OTHER; note = 2'-O-methyl ribonucleotide
  modified_base 42: mod_base = OTHER; note = 2'-O-methyl ribonucleotide
  modified_base 46: mod_base = OTHER; note = 2'-O-methyl ribonucleotide
  modified_base 48: mod_base = OTHER; note = 2'-O-methyl ribonucleotide
  modified_base 50: mod_base = OTHER; note = 2'-O-methyl ribonucleotide
  modified_base 52: mod_base = OTHER; note = 2'-O-methyl ribonucleotide
  modified_base 53: mod_base = OTHER; note = 2'-O-methyl ribonucleotide
  modified_base 54: mod_base = OTHER; note = 2'-O-methyl ribonucleotide
  modified_base 55: mod_base = OTHER; note = 2'-O-methyl ribonucleotide
  modified_base 56: mod_base = OTHER; note = 2'-O-methyl ribonucleotide
  modified_base 57: mod_base = OTHER; note = 2'-O-methyl ribonucleotide
  modified_base 60: mod_base = OTHER; note = 2'-O-methyl ribonucleotide
  modified_base 61: mod_base = OTHER; note = 2'-O-methyl ribonucleotide
  modified_base 66: mod_base = OTHER; note = 2'-O-methyl ribonucleotide
  modified_base 67: mod_base = OTHER; note = 2'-O-methyl ribonucleotide
  modified_base 70: mod_base = OTHER; note = 2'-O-methyl ribonucleotide
  modified_base 71: mod_base = OTHER; note = 2'-O-methyl ribonucleotide
  modified_base 72: mod_base = OTHER; note = 2'-O-methyl ribonucleotide
  modified_base 74: mod_base = OTHER; note = 2'-O-methyl ribonucleotide
  modified_base 75: mod_base = OTHER; note = 2'-O-methyl ribonucleotide
  modified_base 76: mod_base = OTHER; note = 2'-O-methyl ribonucleotide
  modified_base 77: mod_base = OTHER; note = 2'-O-methyl ribonucleotide
  modified_base 78: mod_base = OTHER; note = 2'-O-methyl ribonucleotide
  modified_base 79: mod_base = OTHER; note = 2'-O-methyl ribonucleotide
  modified_base 80: mod_base = OTHER; note = 2'-O-methyl ribonucleotide
  modified_base 82: mod_base = OTHER; note = 2'-O-methyl ribonucleotide
  modified_base 83: mod_base = OTHER; note = 2'-O-methyl ribonucleotide
  modified_base 84: mod_base = OTHER; note = 2'-O-methyl ribonucleotide
  modified_base 85: mod_base = OTHER; note = 2'-O-methyl ribonucleotide
  modified_base 86: mod_base = OTHER; note = 2'-O-methyl ribonucleotide
  modified_base 87: mod_base = OTHER; note = 2'-O-methyl ribonucleotide
  modified_base 89: mod_base = OTHER; note = 2'-O-methyl ribonucleotide
  modified_base 92: mod_base = OTHER; note = 2'-O-methyl ribonucleotide
  modified_base 93: mod_base = OTHER; note = 2'-O-methyl ribonucleotide
  modified_base 94: mod_base = OTHER; note = 2'-O-methyl ribonucleotide
  modified_base 95: mod_base = OTHER; note = 2'-O-methyl ribonucleotide
  modified_base 96: mod_base = OTHER; note = 2'-O-methyl ribonucleotide
  modified_base 97: mod_base = OTHER; note = 2'-O-methyl ribonucleotide
  modified_base 98: mod_base = OTHER; note = 2'-O-methyl ribonucleotide
  modified_base 99: mod_base = OTHER; note = 2'-O-methyl ribonucleotide
  modified_base 100: mod_base = OTHER; note = 2'-O-methyl ribonucleotide
  modified_base 1..3: mod_base = OTHER; note = phosphorothioate linkage
  modified_base 25..26: mod_base = OTHER; note = phosphorothioate linkage
  modified_base 64..65: mod_base = OTHER; note = phosphorothioate linkage
  modified_base 98..100: mod_base = OTHER; note = phosphorothioate linkage

SEQ ID NO: 2785 - RNA, 103 nt, synthetic construct; identical to SEQ ID NO: 1643
  source 1..103: mol_type = other RNA
  modified_base 1: mod_base = OTHER; note = 2'-O-methyl ribonucleotide
  modified_base 2: mod_base = OTHER; note = 2'-O-methyl ribonucleotide
  modified_base 3: mod_base = OTHER; note = 2'-O-methyl ribonucleotide
  modified_base 21: mod_base = OTHER; note = 2'-O-methyl ribonucleotide
  modified_base 28: mod_base = OTHER; note = 2'-O-methyl ribonucleotide
  modified_base 29: mod_base = OTHER; note = 2'-O-methyl ribonucleotide
  modified_base 30: mod_base = OTHER; note = 2'-O-methyl ribonucleotide
  modified_base 31: mod_base = OTHER; note = 2'-O-methyl ribonucleotide
  modified_base 32: mod_base = OTHER; note = 2'-O-methyl ribonucleotide
  modified_base 33: mod_base = OTHER; note = 2'-O-methyl ribonucleotide
  modified_base 34: mod_base = OTHER; note = 2'-O-methyl ribonucleotide
  modified_base 35: mod_base = OTHER; note = 2'-O-methyl ribonucleotide
  modified_base 36: mod_base = OTHER; note = 2'-O-methyl ribonucleotide
  modified_base 37: mod_base = OTHER; note = 2'-O-methyl ribonucleotide
  modified_base 38: mod_base = OTHER; note = 2'-O-methyl ribonucleotide
  modified_base 39: mod_base = OTHER; note = 2'-O-methyl ribonucleotide
  modified_base 40: mod_base = OTHER; note = 2'-O-methyl ribonucleotide
  modified_base 41: mod_base = OTHER; note = 2'-O-methyl ribonucleotide
  modified_base 42: mod_base = OTHER; note = 2'-O-methyl ribonucleotide
  modified_base 46: mod_base = OTHER; note = 2'-O-methyl ribonucleotide
  modified_base 48: mod_base = OTHER; note = 2'-O-methyl ribonucleotide
  modified_base 50: mod_base = OTHER; note = 2'-O-methyl ribonucleotide
  modified_base 52: mod_base = OTHER; note = 2'-O-methyl ribonucleotide
  modified_base 53: mod_base = OTHER; note = 2'-O-methyl ribonucleotide
  modified_base 54: mod_base = OTHER; note = 2'-O-methyl ribonucleotide
  modified_base 55: mod_base = OTHER; note = 2'-O-methyl ribonucleotide
  modified_base 56: mod_base = OTHER; note = 2'-O-methyl ribonucleotide
  modified_base 57: mod_base = OTHER; note = 2'-O-methyl ribonucleotide
  modified_base 60: mod_base = OTHER; note = 2'-O-methyl ribonucleotide
  modified_base 61: mod_base = OTHER; note = 2'-O-methyl ribonucleotide
  modified_base 66: mod_base = OTHER; note = 2'-O-methyl ribonucleotide
  modified_base 67: mod_base = OTHER; note = 2'-O-methyl ribonucleotide
  modified_base 70: mod_base = OTHER; note = 2'-O-methyl ribonucleotide
  modified_base 71: mod_base = OTHER; note = 2'-O-methyl ribonucleotide
  modified_base 72: mod_base = OTHER; note = 2'-O-methyl ribonucleotide
  modified_base 73: mod_base = OTHER; note = 2'-O-methyl ribonucleotide
  modified_base 74: mod_base = OTHER; note = 2'-O-methyl ribonucleotide
  modified_base 75: mod_base = OTHER; note = 2'-O-methyl ribonucleotide
  modified_base 76: mod_base = OTHER; note = 2'-O-methyl ribonucleotide
  modified_base 77: mod_base = OTHER; note = 2'-O-methyl ribonucleotide
  modified_base 78: mod_base = OTHER; note = 2'-O-methyl ribonucleotide
  modified_base 79: mod_base = OTHER; note = 2'-O-methyl ribonucleotide
  modified_base 80: mod_base = OTHER; note = 2'-O-methyl ribonucleotide
  modified_base 81: mod_base = OTHER; note = 2'-O-methyl ribonucleotide
  modified_base 83: mod_base = OTHER; note = 2'-O-methyl ribonucleotide
  modified_base 84: mod_base = OTHER; note = 2'-O-methyl ribonucleotide
  modified_base 85: mod_base = OTHER; note = 2'-O-methyl ribonucleotide
  modified_base 86: mod_base = OTHER; note = 2'-O-methyl ribonucleotide
  modified_base 87: mod_base = OTHER; note = 2'-O-methyl ribonucleotide
  modified_base 88: mod_base = OTHER; note = 2'-O-methyl ribonucleotide
  modified_base 89: mod_base = OTHER; note = 2'-O-methyl ribonucleotide
  modified_base 90: mod_base = OTHER; note = 2'-O-methyl ribonucleotide
  modified_base 91: mod_base = OTHER; note = 2'-O-methyl ribonucleotide
  modified_base 92: mod_base = OTHER; note = 2'-O-methyl ribonucleotide
  modified_base 93: mod_base = OTHER; note = 2'-O-methyl ribonucleotide
  modified_base 94: mod_base = OTHER; note = 2'-O-methyl ribonucleotide
  modified_base 95: mod_base = OTHER; note = 2'-O-methyl ribonucleotide
  modified_base 96: mod_base = OTHER; note = 2'-O-methyl ribonucleotide
  modified_base 97: mod_base = OTHER; note = 2'-O-methyl ribonucleotide
  modified_base 98: mod_base = OTHER; note = 2'-O-methyl ribonucleotide
  modified_base 99: mod_base = OTHER; note = 2'-O-methyl ribonucleotide
  modified_base 100: mod_base = OTHER; note = 2'-O-methyl ribonucleotide
  modified_base 1..3: mod_base = OTHER; note = phosphorothioate linkage
  modified_base 25..26: mod_base = OTHER; note = phosphorothioate linkage
  modified_base 45..46: mod_base = OTHER; note = phosphorothioate linkage
  modified_base 64..65: mod_base = OTHER; note = phosphorothioate linkage
  modified_base 98..100: mod_base = OTHER; note = phosphorothioate linkage

SEQ ID NO: 2786 - RNA, 103 nt, synthetic construct; identical to SEQ ID NO: 1643
  source 1..103: mol_type = other RNA
  modified_base 1: mod_base = OTHER; note = 2'-O-methyl ribonucleotide
  modified_base 2: mod_base = OTHER; note = 2'-O-methyl ribonucleotide
  modified_base 3: mod_base = OTHER; note = 2'-O-methyl ribonucleotide
  modified_base 21: mod_base = OTHER; note = 2'-O-methyl ribonucleotide
  modified_base 28: mod_base = OTHER; note = 2'-O-methyl ribonucleotide
  modified_base 29: mod_base = OTHER; note = 2'-O-methyl ribonucleotide
  modified_base 30: mod_base = OTHER; note = 2'-O-methyl ribonucleotide
  modified_base 31: mod_base = OTHER; note = 2'-O-methyl ribonucleotide
  modified_base 32: mod_base = OTHER; note = 2'-O-methyl ribonucleotide
  modified_base 34: mod_base = OTHER; note = 2'-O-methyl ribonucleotide
  modified_base 35: mod_base = OTHER; note = 2'-O-methyl ribonucleotide
  modified_base 36: mod_base = OTHER; note = 2'-O-methyl ribonucleotide
  modified_base 37: mod_base = OTHER; note = 2'-O-methyl ribonucleotide
  modified_base 38: mod_base = OTHER; note = 2'-O-methyl ribonucleotide
  modified_base 39: mod_base = OTHER; note = 2'-O-methyl ribonucleotide
  modified_base 40: mod_base = OTHER; note = 2'-O-methyl ribonucleotide
  modified_base 41: mod_base = OTHER; note = 2'-O-methyl ribonucleotide
  modified_base 42: mod_base = OTHER; note = 2'-O-methyl ribonucleotide
  modified_base 46: mod_base = OTHER; note = 2'-O-methyl ribonucleotide
  modified_base 48: mod_base = OTHER; note = 2'-O-methyl ribonucleotide
  modified_base 50: mod_base = OTHER; note = 2'-O-methyl ribonucleotide
  modified_base 52: mod_base = OTHER; note = 2'-O-methyl ribonucleotide
  modified_base 53: mod_base = OTHER; note = 2'-O-methyl ribonucleotide
  modified_base 54: mod_base = OTHER; note = 2'-O-methyl ribonucleotide
  modified_base 55: mod_base = OTHER; note = 2'-O-methyl ribonucleotide
  modified_base 56: mod_base = OTHER; note = 2'-O-methyl ribonucleotide
  modified_base 57: mod_base = OTHER; note = 2'-O-methyl ribonucleotide
  modified_base 60: mod_base = OTHER; note = 2'-O-methyl ribonucleotide
  modified_base 61: mod_base = OTHER; note = 2'-O-methyl ribonucleotide
  modified_base 66: mod_base = OTHER; note = 2'-O-methyl ribonucleotide
  modified_base 67: mod_base = OTHER; note = 2'-O-methyl ribonucleotide
  modified_base 70: mod_base = OTHER; note = 2'-O-methyl ribonucleotide
  modified_base 71: mod_base = OTHER; note = 2'-O-methyl ribonucleotide
  modified_base 72: mod_base = OTHER; note = 2'-O-methyl ribonucleotide
  modified_base 74: mod_base = OTHER; note = 2'-O-methyl ribonucleotide
  modified_base 75: mod_base = OTHER; note = 2'-O-methyl ribonucleotide
  modified_base 76: mod_base = OTHER; note = 2'-O-methyl ribonucleotide
  modified_base 77: mod_base = OTHER; note = 2'-O-methyl ribonucleotide
  modified_base 78: mod_base = OTHER; note = 2'-O-methyl ribonucleotide
  modified_base 79: mod_base = OTHER; note = 2'-O-methyl ribonucleotide
  modified_base 80: mod_base = OTHER; note = 2'-O-methyl ribonucleotide
  modified_base 81: mod_base = OTHER; note = 2'-O-methyl ribonucleotide
  modified_base 83: mod_base = OTHER; note = 2'-O-methyl ribonucleotide
  modified_base 84: mod_base = OTHER; note = 2'-O-methyl ribonucleotide
  modified_base 85: mod_base = OTHER; note = 2'-O-methyl ribonucleotide
  modified_base 86: mod_base = OTHER; note = 2'-O-methyl ribonucleotide
  modified_base 87: mod_base = OTHER; note = 2'-O-methyl ribonucleotide
  modified_base 88: mod_base = OTHER; note = 2'-O-methyl ribonucleotide
  modified_base 89: mod_base = OTHER; note = 2'-O-methyl ribonucleotide
  modified_base 90: mod_base = OTHER; note = 2'-O-methyl ribonucleotide
  modified_base 91: mod_base = OTHER; note = 2'-O-methyl ribonucleotide
  modified_base 92: mod_base = OTHER; note = 2'-O-methyl ribonucleotide
  modified_base 93: mod_base = OTHER; note = 2'-O-methyl ribonucleotide
  modified_base 94: mod_base = OTHER; note = 2'-O-methyl ribonucleotide
  modified_base 95: mod_base = OTHER; note = 2'-O-methyl ribonucleotide
  modified_base 96: mod_base = OTHER; note = 2'-O-methyl ribonucleotide
  modified_base 97: mod_base = OTHER; note = 2'-O-methyl ribonucleotide
  modified_base 98: mod_base = OTHER; note = 2'-O-methyl ribonucleotide
  modified_base 99: mod_base = OTHER; note = 2'-O-methyl ribonucleotide
  modified_base 100: mod_base = OTHER; note = 2'-O-methyl ribonucleotide
  modified_base 1..3: mod_base = OTHER; note = phosphorothioate linkage
  modified_base 25..26: mod_base = OTHER; note = phosphorothioate linkage
  modified_base 45..46: mod_base = OTHER; note = phosphorothioate linkage
  modified_base 64..65: mod_base = OTHER; note = phosphorothioate linkage
  modified_base 98..100: mod_base = OTHER; note = phosphorothioate linkage

SEQ ID NO: 2787 - RNA, 103 nt, synthetic construct; identical to SEQ ID NO: 1699
  source 1..103: mol_type = other RNA
  modified_base 1: mod_base = OTHER; note = 2'-O-methyl ribonucleotide
  modified_base 2: mod_base = OTHER; note = 2'-O-methyl ribonucleotide
  modified_base 3: mod_base = OTHER; note = 2'-O-methyl ribonucleotide
  modified_base 21: mod_base = OTHER; note = 2'-O-methyl ribonucleotide
  modified_base 28: mod_base = OTHER; note = 2'-O-methyl ribonucleotide
  modified_base 29: mod_base = OTHER; note = 2'-O-methyl ribonucleotide
  modified_base 30: mod_base = OTHER; note = 2'-O-methyl ribonucleotide
  modified_base 31: mod_base = OTHER; note = 2'-O-methyl ribonucleotide
  modified_base 32: mod_base = OTHER; note = 2'-O-methyl ribonucleotide
  modified_base 33: mod_base = OTHER; note = 2'-O-methyl ribonucleotide
  modified_base 34: mod_base = OTHER; note = 2'-O-methyl ribonucleotide
  modified_base 35: mod_base = OTHER; note = 2'-O-methyl ribonucleotide
  modified_base 36: mod_base = OTHER; note = 2'-O-methyl ribonucleotide
  modified_base 37: mod_base = OTHER; note = 2'-O-methyl ribonucleotide
  modified_base 38: mod_base = OTHER; note = 2'-O-methyl ribonucleotide
  modified_base 39: mod_base = OTHER; note = 2'-O-methyl ribonucleotide
  modified_base 40: mod_base = OTHER; note = 2'-O-methyl ribonucleotide
  modified_base 41: mod_base = OTHER; note = 2'-O-methyl ribonucleotide
  modified_base 42: mod_base = OTHER; note = 2'-O-methyl ribonucleotide
  modified_base 46: mod_base = OTHER; note = 2'-O-methyl ribonucleotide
  modified_base 48: mod_base = OTHER; note = 2'-O-methyl ribonucleotide
  modified_base 50: mod_base = OTHER; note = 2'-O-methyl ribonucleotide
  modified_base 52: mod_base = OTHER; note = 2'-O-methyl ribonucleotide
  modified_base 53: mod_base = OTHER; note = 2'-O-methyl ribonucleotide
  modified_base 54: mod_base = OTHER; note = 2'-O-methyl ribonucleotide
  modified_base 55: mod_base = OTHER; note = 2'-O-methyl ribonucleotide
  modified_base 56: mod_base = OTHER; note = 2'-O-methyl ribonucleotide
  modified_base 57: mod_base = OTHER; note = 2'-O-methyl ribonucleotide
  modified_base 60: mod_base = OTHER; note = 2'-O-methyl ribonucleotide
  modified_base 61: mod_base = OTHER; note = 2'-O-methyl ribonucleotide
  modified_base 66: mod_base = OTHER; note = 2'-O-methyl ribonucleotide
  modified_base 67: mod_base = OTHER; note = 2'-O-methyl ribonucleotide
  modified_base 70: mod_base = OTHER; note = 2'-O-methyl ribonucleotide
  modified_base 71: mod_base = OTHER; note = 2'-O-methyl ribonucleotide
  modified_base 72: mod_base = OTHER; note = 2'-O-methyl ribonucleotide
  modified_base 73: mod_base = OTHER; note = 2'-O-methyl ribonucleotide
  modified_base 74: mod_base = OTHER; note = 2'-O-methyl ribonucleotide
  modified_base 75: mod_base = OTHER; note = 2'-O-methyl ribonucleotide
  modified_base 76: mod_base = OTHER; note = 2'-O-methyl ribonucleotide
  modified_base 77: mod_base = OTHER; note = 2'-O-methyl ribonucleotide
  modified_base 78: mod_base = OTHER; note = 2'-O-methyl ribonucleotide
  modified_base 79: mod_base = OTHER; note = 2'-O-methyl ribonucleotide
  modified_base 80: mod_base = OTHER; note = 2'-O-methyl ribonucleotide
  modified_base 81: mod_base = OTHER; note = 2'-O-methyl ribonucleotide
  modified_base 83: mod_base = OTHER; note = 2'-O-methyl ribonucleotide
  modified_base 84: mod_base = OTHER; note = 2'-O-methyl ribonucleotide
  modified_base 85: mod_base = OTHER; note = 2'-O-methyl ribonucleotide
  modified_base 86: mod_base = OTHER; note = 2'-O-methyl ribonucleotide
  modified_base 87: mod_base = OTHER; note = 2'-O-methyl ribonucleotide
  modified_base 88: mod_base = OTHER; note = 2'-O-methyl ribonucleotide
  modified_base 89: mod_base = OTHER; note = 2'-O-methyl ribonucleotide
  modified_base 90: mod_base = OTHER; note = 2'-O-methyl ribonucleotide
  modified_base 91: mod_base = OTHER; note = 2'-O-methyl ribonucleotide
  modified_base 92: mod_base = OTHER; note = 2'-O-methyl ribonucleotide
  modified_base 93: mod_base = OTHER; note = 2'-O-methyl ribonucleotide
  modified_base 94: mod_base = OTHER; note = 2'-O-methyl ribonucleotide
  modified_base 95: mod_base = OTHER; note = 2'-O-methyl ribonucleotide
  modified_base 96: mod_base = OTHER; note = 2'-O-methyl ribonucleotide
  modified_base 97: mod_base = OTHER; note = 2'-O-methyl ribonucleotide
  modified_base 98: mod_base = OTHER; note = 2'-O-methyl ribonucleotide
  modified_base 99: mod_base = OTHER; note = 2'-O-methyl ribonucleotide
  modified_base 100: mod_base = OTHER; note = 2'-O-methyl ribonucleotide
  modified_base 1..3: mod_base = OTHER; note = phosphorothioate linkage
  modified_base 25..26: mod_base = OTHER; note = phosphorothioate linkage
  modified_base 45..46: mod_base = OTHER; note = phosphorothioate linkage
  modified_base 64..65: mod_base = OTHER; note = phosphorothioate linkage
  modified_base 98..100: mod_base = OTHER; note = phosphorothioate linkage

SEQ ID NO: 2788 - RNA, 103 nt, synthetic construct; identical to SEQ ID NO: 1699
  source 1..103: mol_type = other RNA
  modified_base 1: mod_base = OTHER; note = 2'-O-methyl ribonucleotide
  modified_base 2: mod_base = OTHER; note = 2'-O-methyl ribonucleotide
  modified_base 3: mod_base = OTHER; note = 2'-O-methyl ribonucleotide
  modified_base 21: mod_base = OTHER; note = 2'-O-methyl ribonucleotide
  modified_base 28: mod_base = OTHER; note = 2'-O-methyl ribonucleotide
  modified_base 29: mod_base = OTHER; note = 2'-O-methyl ribonucleotide
  modified_base 30: mod_base = OTHER; note = 2'-O-methyl ribonucleotide
  modified_base 31: mod_base = OTHER; note = 2'-O-methyl ribonucleotide
  modified_base 32: mod_base = OTHER; note = 2'-O-methyl ribonucleotide
  modified_base 34: mod_base = OTHER; note = 2'-O-methyl ribonucleotide
  modified_base 35: mod_base = OTHER; note = 2'-O-methyl ribonucleotide
  modified_base 36: mod_base = OTHER; note = 2'-O-methyl ribonucleotide
  modified_base 37: mod_base = OTHER; note = 2'-O-methyl ribonucleotide
  modified_base 38: mod_base = OTHER; note = 2'-O-methyl ribonucleotide
  modified_base 39: mod_base = OTHER; note = 2'-O-methyl ribonucleotide
  modified_base 40: mod_base = OTHER; note = 2'-O-methyl ribonucleotide
  modified_base 41: mod_base = OTHER; note = 2'-O-methyl ribonucleotide
  modified_base 42: mod_base = OTHER; note = 2'-O-methyl ribonucleotide
  modified_base 46: mod_base = OTHER; note = 2'-O-methyl ribonucleotide
  modified_base 48: mod_base = OTHER; note = 2'-O-methyl ribonucleotide
  modified_base 50: mod_base = OTHER; note = 2'-O-methyl ribonucleotide
  modified_base 52: mod_base = OTHER; note = 2'-O-methyl ribonucleotide
  modified_base 53: mod_base = OTHER; note = 2'-O-methyl ribonucleotide
  modified_base 54: mod_base = OTHER; note = 2'-O-methyl ribonucleotide
  modified_base 55: mod_base = OTHER; note = 2'-O-methyl ribonucleotide
  modified_base 56: mod_base = OTHER; note = 2'-O-methyl ribonucleotide
  modified_base 57: mod_base = OTHER; note = 2'-O-methyl ribonucleotide
  modified_base 60: mod_base = OTHER; note = 2'-O-methyl ribonucleotide
  modified_base 61: mod_base = OTHER; note = 2'-O-methyl ribonucleotide
  modified_base 66: mod_base = OTHER; note = 2'-O-methyl ribonucleotide
  modified_base 67: mod_base = OTHER; note = 2'-O-methyl ribonucleotide
  modified_base 70: mod_base = OTHER; note = 2'-O-methyl ribonucleotide
  modified_base 71: mod_base = OTHER; note = 2'-O-methyl ribonucleotide
  modified_base 72: mod_base = OTHER; note = 2'-O-methyl ribonucleotide
  modified_base 74: mod_base = OTHER; note = 2'-O-methyl ribonucleotide
  modified_base 75: mod_base = OTHER; note = 2'-O-methyl ribonucleotide
  modified_base 76: mod_base = OTHER; note = 2'-O-methyl ribonucleotide
  modified_base 77: mod_base = OTHER; note = 2'-O-methyl ribonucleotide
  modified_base 78: mod_base = OTHER; note = 2'-O-methyl ribonucleotide
  modified_base 79: mod_base = OTHER; note = 2'-O-methyl ribonucleotide
  modified_base 80: mod_base = OTHER; note = 2'-O-methyl ribonucleotide
  modified_base 81: mod_base = OTHER; note = 2'-O-methyl ribonucleotide
  modified_base 83: mod_base = OTHER; note = 2'-O-methyl ribonucleotide
  modified_base 84: mod_base = OTHER; note = 2'-O-methyl ribonucleotide
  modified_base 85: mod_base = OTHER; note = 2'-O-methyl ribonucleotide
  modified_base 86: mod_base = OTHER; note = 2'-O-methyl ribonucleotide
  modified_base 87: mod_base = OTHER; note = 2'-O-methyl ribonucleotide
  modified_base 88: mod_base = OTHER; note = 2'-O-methyl ribonucleotide
  modified_base 89: mod_base = OTHER; note = 2'-O-methyl ribonucleotide
  modified_base 90: mod_base = OTHER; note = 2'-O-methyl ribonucleotide
  modified_base 91: mod_base = OTHER; note = 2'-O-methyl ribonucleotide
  modified_base 92: mod_base = OTHER; note = 2'-O-methyl ribonucleotide
  modified_base 93: mod_base = OTHER; note = 2'-O-methyl ribonucleotide
  modified_base 94: mod_base = OTHER; note = 2'-O-methyl ribonucleotide
  modified_base 95: mod_base = OTHER; note = 2'-O-methyl ribonucleotide
  modified_base 96: mod_base = OTHER; note = 2'-O-methyl ribonucleotide
  modified_base 97: mod_base = OTHER; note = 2'-O-methyl ribonucleotide
  modified_base 98: mod_base = OTHER; note = 2'-O-methyl ribonucleotide
  modified_base 99: mod_base = OTHER; note = 2'-O-methyl ribonucleotide
  modified_base 100: mod_base = OTHER; note = 2'-O-methyl ribonucleotide
  modified_base 1..3: mod_base = OTHER; note = phosphorothioate linkage
  modified_base 25..26: mod_base = OTHER; note = phosphorothioate linkage
  modified_base 45..46: mod_base = OTHER; note = phosphorothioate linkage
  modified_base 64..65: mod_base = OTHER; note = phosphorothioate linkage
  modified_base 98..100: mod_base = OTHER; note = phosphorothioate linkage

SEQ ID NO: 2789 - RNA, 103 nt, synthetic construct; identical to SEQ ID NO: 1700
  source 1..103: mol_type = other RNA
  modified_base 1: mod_base = OTHER; note = 2'-O-methyl ribonucleotide
  modified_base 2: mod_base = OTHER; note = 2'-O-methyl ribonucleotide
  modified_base 3: mod_base = OTHER; note = 2'-O-methyl ribonucleotide
  modified_base 21: mod_base = OTHER; note = 2'-O-methyl ribonucleotide
  modified_base 28: mod_base = OTHER; note = 2'-O-methyl ribonucleotide
  modified_base 29: mod_base = OTHER; note = 2'-O-methyl ribonucleotide
  modified_base 30: mod_base = OTHER; note = 2'-O-methyl ribonucleotide
  modified_base 31: mod_base = OTHER; note = 2'-O-methyl ribonucleotide
  modified_base 32: mod_base = OTHER; note = 2'-O-methyl ribonucleotide
  modified_base 33: mod_base = OTHER; note = 2'-O-methyl ribonucleotide
  modified_base 34: mod_base = OTHER; note = 2'-O-methyl ribonucleotide
  modified_base 35: mod_base = OTHER; note = 2'-O-methyl ribonucleotide
  modified_base 36: mod_base = OTHER; note = 2'-O-methyl ribonucleotide
  modified_base 37: mod_base = OTHER; note = 2'-O-methyl ribonucleotide
  modified_base 38: mod_base = OTHER; note = 2'-O-methyl ribonucleotide
  modified_base 39: mod_base = OTHER; note = 2'-O-methyl ribonucleotide
  modified_base 40: mod_base = OTHER; note = 2'-O-methyl ribonucleotide
  modified_base 41: mod_base = OTHER; note = 2'-O-methyl ribonucleotide
  modified_base 42: mod_base = OTHER; note = 2'-O-methyl ribonucleotide
  modified_base 46: mod_base = OTHER; note = 2'-O-methyl ribonucleotide
  modified_base 48: mod_base = OTHER; note = 2'-O-methyl ribonucleotide
  modified_base 50: mod_base = OTHER; note = 2'-O-methyl ribonucleotide
  modified_base 52: mod_base = OTHER; note = 2'-O-methyl ribonucleotide
  modified_base 53: mod_base = OTHER; note = 2'-O-methyl ribonucleotide
  modified_base 54: mod_base = OTHER; note = 2'-O-methyl ribonucleotide
  modified_base 57: mod_base = OTHER; note = 2'-O-methyl ribonucleotide
  modified_base 61: mod_base = OTHER; note = 2'-O-methyl ribonucleotide
  modified_base 66: mod_base = OTHER; note = 2'-O-methyl ribonucleotide
  modified_base 67: mod_base = OTHER; note = 2'-O-methyl ribonucleotide
  modified_base 70: mod_base = OTHER; note = 2'-O-methyl ribonucleotide
  modified_base 71: mod_base = OTHER; note = 2'-O-methyl ribonucleotide
  modified_base 72: mod_base = OTHER; note = 2'-O-methyl ribonucleotide
  modified_base 74: mod_base = OTHER; note = 2'-O-methyl ribonucleotide
  modified_base 75: mod_base = OTHER; note = 2'-O-methyl ribonucleotide
  modified_base 76: mod_base = OTHER; note = 2'-O-methyl ribonucleotide
  modified_base 77: mod_base = OTHER; note = 2'-O-methyl ribonucleotide
  modified_base 78: mod_base = OTHER; note = 2'-O-methyl ribonucleotide
  modified_base 79: mod_base = OTHER; note = 2'-O-methyl ribonucleotide
  modified_base 80: mod_base = OTHER; note = 2'-O-methyl ribonucleotide
  modified_base 82: mod_base = OTHER; note = 2'-O-methyl ribonucleotide
  modified_base 83: mod_base = OTHER; note = 2'-O-methyl ribonucleotide
  modified_base 84: mod_base = OTHER; note = 2'-O-methyl ribonucleotide
  modified_base 85: mod_base = OTHER; note = 2'-O-methyl ribonucleotide
  modified_base 86: mod_base = OTHER; note = 2'-O-methyl ribonucleotide
  modified_base 87: mod_base = OTHER; note = 2'-O-methyl ribonucleotide
  modified_base 89: mod_base = OTHER; note = 2'-O-methyl ribonucleotide
  modified_base 92: mod_base = OTHER; note = 2'-O-methyl ribonucleotide
  modified_base 93: mod_base = OTHER; note = 2'-O-methyl ribonucleotide
  modified_base 94: mod_base = OTHER; note = 2'-O-methyl ribonucleotide
  modified_base 95: mod_base = OTHER; note = 2'-O-methyl ribonucleotide
  modified_base 96: mod_base = OTHER; note = 2'-O-methyl ribonucleotide
  modified_base 97: mod_base = OTHER; note = 2'-O-methyl ribonucleotide
  modified_base 98: mod_base = OTHER; note = 2'-O-methyl ribonucleotide
  modified_base 99: mod_base = OTHER; note = 2'-O-methyl ribonucleotide
  modified_base 100: mod_base = OTHER; note = 2'-O-methyl ribonucleotide
  modified_base 1..3: mod_base = OTHER; note = phosphorothioate linkage
  modified_base 25..26: mod_base = OTHER; note = phosphorothioate linkage
  modified_base 45..46: mod_base = OTHER; note = phosphorothioate linkage
  modified_base 64..65: mod_base = OTHER; note = phosphorothioate linkage
  modified_base 98..100: mod_base = OTHER; note = phosphorothioate linkage

SEQ ID NO: 2790 - RNA, 103 nt, synthetic construct; identical to SEQ ID NO: 1700
  source 1..103: mol_type = other RNA
  modified_base 1: mod_base = OTHER; note = 2'-O-methyl ribonucleotide
  modified_base 2: mod_base = OTHER; note = 2'-O-methyl ribonucleotide
  modified_base 3: mod_base = OTHER; note = 2'-O-methyl ribonucleotide
  modified_base 21: mod_base = OTHER; note = 2'-O-methyl ribonucleotide
  modified_base 28: mod_base = OTHER; note = 2'-O-methyl ribonucleotide
  modified_base 29: mod_base = OTHER; note = 2'-O-methyl ribonucleotide
  modified_base 30: mod_base = OTHER; note = 2'-O-methyl ribonucleotide
  modified_base 31: mod_base = OTHER; note = 2'-O-methyl ribonucleotide
  modified_base 32: mod_base = OTHER; note = 2'-O-methyl ribonucleotide
  modified_base 33: mod_base = OTHER; note = 2'-O-methyl ribonucleotide
  modified_base 34: mod_base = OTHER; note = 2'-O-methyl ribonucleotide
  modified_base 35: mod_base = OTHER; note = 2'-O-methyl ribonucleotide
  modified_base 36: mod_base = OTHER; note = 2'-O-methyl ribonucleotide
  modified_base 37: mod_base = OTHER; note = 2'-O-methyl ribonucleotide
  modified_base 38: mod_base = OTHER; note = 2'-O-methyl ribonucleotide
  modified_base 39: mod_base = OTHER; note = 2'-O-methyl ribonucleotide
  modified_base 40: mod_base = OTHER; note = 2'-O-methyl ribonucleotide
  modified_base 41: mod_base = OTHER; note = 2'-O-methyl ribonucleotide
  modified_base 42: mod_base = OTHER; note = 2'-O-methyl ribonucleotide
  modified_base 46: mod_base = OTHER; note = 2'-O-methyl ribonucleotide
  modified_base 48: mod_base = OTHER; note = 2'-O-methyl ribonucleotide
  modified_base 50: mod_base = OTHER; note = 2'-O-methyl ribonucleotide
  modified_base 52: mod_base = OTHER; note = 2'-O-methyl ribonucleotide
  modified_base 53: mod_base = OTHER; note = 2'-O-methyl ribonucleotide
  modified_base 54: mod_base = OTHER; note = 2'-O-methyl ribonucleotide
  modified_base 55: mod_base = OTHER; note = 2'-O-methyl ribonucleotide
  modified_base 56: mod_base = OTHER; note = 2'-O-methyl ribonucleotide
  modified_base 57: mod_base = OTHER; note = 2'-O-methyl ribonucleotide
  modified_base 60: mod_base = OTHER; note = 2'-O-methyl ribonucleotide
  modified_base 61: mod_base = OTHER; note = 2'-O-methyl ribonucleotide
  modified_base 66: mod_base = OTHER; note = 2'-O-methyl ribonucleotide
  modified_base 67: mod_base = OTHER; note = 2'-O-methyl ribonucleotide
  modified_base 70: mod_base = OTHER; note = 2'-O-methyl ribonucleotide
  modified_base 71: mod_base = OTHER; note = 2'-O-methyl ribonucleotide
  modified_base 72: mod_base = OTHER; note = 2'-O-methyl ribonucleotide
  modified_base 74: mod_base = OTHER; note = 2'-O-methyl ribonucleotide
  modified_base 75: mod_base = OTHER; note = 2'-O-methyl ribonucleotide
  modified_base 76: mod_base = OTHER; note = 2'-O-methyl ribonucleotide
  modified_base 77: mod_base = OTHER; note = 2'-O-methyl ribonucleotide
  modified_base 78: mod_base = OTHER; note = 2'-O-methyl ribonucleotide
  modified_base 79: mod_base = OTHER; note = 2'-O-methyl ribonucleotide
  modified_base 80: mod_base = OTHER; note = 2'-O-methyl ribonucleotide
  modified_base 82: mod_base = OTHER; note = 2'-O-methyl ribonucleotide
  modified_base 83: mod_base = OTHER; note = 2'-O-methyl ribonucleotide
  modified_base 84: mod_base = OTHER; note = 2'-O-methyl ribonucleotide
  modified_base 85: mod_base = OTHER; note = 2'-O-methyl ribonucleotide
  modified_base 86: mod_base = OTHER; note = 2'-O-methyl ribonucleotide
  modified_base 87: mod_base = OTHER; note = 2'-O-methyl ribonucleotide
  modified_base 89: mod_base = OTHER; note = 2'-O-methyl ribonucleotide
  modified_base 92: mod_base = OTHER; note = 2'-O-methyl ribonucleotide
  modified_base 93: mod_base = OTHER; note = 2'-O-methyl ribonucleotide
  modified_base 94: mod_base = OTHER; note = 2'-O-methyl ribonucleotide
  modified_base 95: mod_base = OTHER; note = 2'-O-methyl ribonucleotide
  modified_base 96: mod_base = OTHER; note = 2'-O-methyl ribonucleotide
  modified_base 97: mod_base = OTHER; note = 2'-O-methyl ribonucleotide
  modified_base 98: mod_base = OTHER; note = 2'-O-methyl ribonucleotide
  modified_base 99: mod_base = OTHER; note = 2'-O-methyl ribonucleotide
  modified_base 100: mod_base = OTHER; note = 2'-O-methyl ribonucleotide
  modified_base 1..3: mod_base = OTHER; note = phosphorothioate linkage
  modified_base 25..26: mod_base = OTHER; note = phosphorothioate linkage
  modified_base 45..46: mod_base = OTHER; note = phosphorothioate linkage
  modified_base 64..65: mod_base = OTHER; note = phosphorothioate linkage
  modified_base 98..100: mod_base = OTHER; note = phosphorothioate linkage

SEQ ID NO: 2791 - RNA, 103 nt, synthetic construct; identical to SEQ ID NO: 1700
  source 1..103: mol_type = other RNA
  modified_base 1: mod_base = OTHER; note = 2'-O-methyl ribonucleotide
  modified_base 2: mod_base = OTHER; note = 2'-O-methyl ribonucleotide
  modified_base 3: mod_base = OTHER; note = 2'-O-methyl ribonucleotide
  modified_base 21: mod_base = OTHER; note = 2'-O-methyl ribonucleotide
  modified_base 28: mod_base = OTHER; note = 2'-O-methyl ribonucleotide
  modified_base 29: mod_base = OTHER; note = 2'-O-methyl ribonucleotide
  modified_base 30: mod_base = OTHER; note = 2'-O-methyl ribonucleotide
  modified_base 31: mod_base = OTHER; note = 2'-O-methyl ribonucleotide
  modified_base 32: mod_base = OTHER; note = 2'-O-methyl ribonucleotide
  modified_base 33: mod_base = OTHER; note = 2'-O-methyl ribonucleotide
  modified_base 34: mod_base = OTHER; note = 2'-O-methyl ribonucleotide
  modified_base 35: mod_base = OTHER; note = 2'-O-methyl ribonucleotide
  modified_base 36: mod_base = OTHER; note = 2'-O-methyl ribonucleotide
  modified_base 37: mod_base = OTHER; note = 2'-O-methyl ribonucleotide
  modified_base 38: mod_base = OTHER; note = 2'-O-methyl ribonucleotide
  modified_base 39: mod_base = OTHER; note = 2'-O-methyl ribonucleotide
  modified_base 40: mod_base = OTHER; note = 2'-O-methyl ribonucleotide
  modified_base 41: mod_base = OTHER; note = 2'-O-methyl ribonucleotide
  modified_base 42: mod_base = OTHER; note = 2'-O-methyl ribonucleotide
  modified_base 46: mod_base = OTHER; note = 2'-O-methyl ribonucleotide
  modified_base 48: mod_base = OTHER; note = 2'-O-methyl ribonucleotide
  modified_base 50: mod_base = OTHER; note = 2'-O-methyl ribonucleotide
  modified_base 52: mod_base = OTHER; note = 2'-O-methyl ribonucleotide
  modified_base 53: mod_base = OTHER; note = 2'-O-methyl ribonucleotide
  modified_base 54: mod_base = OTHER; note = 2'-O-methyl ribonucleotide
  modified_base 57: mod_base = OTHER; note = 2'-O-methyl ribonucleotide
  modified_base 61: mod_base = OTHER; note = 2'-O-methyl ribonucleotide
  modified_base 66: mod_base = OTHER; note = 2'-O-methyl ribonucleotide
  modified_base 67: mod_base = OTHER; note = 2'-O-methyl ribonucleotide
  modified_base 70: mod_base = OTHER; note = 2'-O-methyl ribonucleotide
  modified_base 71: mod_base = OTHER; note = 2'-O-methyl ribonucleotide
  modified_base 72: mod_base = OTHER; note = 2'-O-methyl ribonucleotide
  modified_base 73: mod_base = OTHER; note = 2'-O-methyl ribonucleotide
  modified_base 74: mod_base = OTHER; note = 2'-O-methyl ribonucleotide
  modified_base 75: mod_base = OTHER; note = 2'-O-methyl ribonucleotide
  modified_base 76: mod_base = OTHER; note = 2'-O-methyl ribonucleotide
  modified_base 77: mod_base = OTHER; note = 2'-O-methyl ribonucleotide
  modified_base 78: mod_base = OTHER; note = 2'-O-methyl ribonucleotide
  modified_base 79: mod_base = OTHER; note = 2'-O-methyl ribonucleotide
  modified_base 80: mod_base = OTHER; note = 2'-O-methyl ribonucleotide
  modified_base 82: mod_base = OTHER; note = 2'-O-methyl ribonucleotide
  modified_base 83: mod_base = OTHER; note = 2'-O-methyl ribonucleotide
  modified_base 84: mod_base = OTHER; note = 2'-O-methyl ribonucleotide
  modified_base 85: mod_base = OTHER; note = 2'-O-methyl ribonucleotide
  modified_base 86: mod_base = OTHER; note = 2'-O-methyl ribonucleotide
  modified_base 87: mod_base = OTHER; note = 2'-O-methyl ribonucleotide
  modified_base 89: mod_base = OTHER; note = 2'-O-methyl ribonucleotide
  modified_base 92: mod_base = OTHER; note = 2'-O-methyl ribonucleotide
  modified_base 93: mod_base = OTHER; note = 2'-O-methyl ribonucleotide
  modified_base 94: mod_base = OTHER; note = 2'-O-methyl ribonucleotide
  modified_base 95: mod_base = OTHER; note = 2'-O-methyl ribonucleotide
  modified_base 96: mod_base = OTHER; note = 2'-O-methyl ribonucleotide
  modified_base 97: mod_base = OTHER; note = 2'-O-methyl ribonucleotide
  modified_base 98: mod_base = OTHER; note = 2'-O-methyl ribonucleotide
  modified_base 99: mod_base = OTHER; note = 2'-O-methyl ribonucleotide
  modified_base 100: mod_base = OTHER; note = 2'-O-methyl ribonucleotide
  modified_base 1..3: mod_base = OTHER; note = phosphorothioate linkage
  modified_base 25..26: mod_base = OTHER; note = phosphorothioate linkage
  modified_base 45..46: mod_base = OTHER; note = phosphorothioate linkage
  modified_base 64..65: mod_base = OTHER; note = phosphorothioate linkage
  modified_base 98..100: mod_base = OTHER; note = phosphorothioate linkage

SEQ ID NO: 2792 - RNA, 103 nt, synthetic construct; identical to SEQ ID NO: 1700
  source 1..103: mol_type = other RNA
  modified_base 1: mod_base = OTHER; note = 2'-O-methyl ribonucleotide
  modified_base 2: mod_base = OTHER; note = 2'-O-methyl ribonucleotide
  modified_base 3: mod_base = OTHER; note = 2'-O-methyl ribonucleotide
  modified_base 21: mod_base = OTHER; note = 2'-O-methyl ribonucleotide
  modified_base 28: mod_base = OTHER; note = 2'-O-methyl ribonucleotide
  modified_base 29: mod_base = OTHER; note = 2'-O-methyl ribonucleotide
  modified_base 30: mod_base = OTHER; note = 2'-O-methyl ribonucleotide
  modified_base 31: mod_base = OTHER; note = 2'-O-methyl ribonucleotide
  modified_base 32: mod_base = OTHER; note = 2'-O-methyl ribonucleotide
  modified_base 33: mod_base = OTHER; note = 2'-O-methyl ribonucleotide
  modified_base 34: mod_base = OTHER; note = 2'-O-methyl ribonucleotide
  modified_base 35: mod_base = OTHER; note = 2'-O-methyl ribonucleotide
  modified_base 36: mod_base = OTHER; note = 2'-O-methyl ribonucleotide
  modified_base 37: mod_base = OTHER; note = 2'-O-methyl ribonucleotide
  modified_base 38: mod_base = OTHER; note = 2'-O-methyl ribonucleotide
  modified_base 39: mod_base = OTHER; note = 2'-O-methyl ribonucleotide
  modified_base 40: mod_base = OTHER; note = 2'-O-methyl ribonucleotide
  modified_base 41: mod_base = OTHER; note = 2'-O-methyl ribonucleotide
  modified_base 42: mod_base = OTHER; note = 2'-O-methyl ribonucleotide
  modified_base 46: mod_base = OTHER; note = 2'-O-methyl ribonucleotide
  modified_base 48: mod_base = OTHER; note = 2'-O-methyl ribonucleotide
  modified_base 50: mod_base = OTHER; note = 2'-O-methyl ribonucleotide
  modified_base 52: mod_base = OTHER; note = 2'-O-methyl ribonucleotide
  modified_base 53: mod_base = OTHER; note = 2'-O-methyl ribonucleotide
  modified_base 54: mod_base = OTHER; note = 2'-O-methyl ribonucleotide
  modified_base 57: mod_base = OTHER; note = 2'-O-methyl ribonucleotide
  modified_base 61: mod_base = OTHER; note = 2'-O-methyl ribonucleotide
  modified_base 66: mod_base = OTHER; note = 2'-O-methyl ribonucleotide
  modified_base 67: mod_base = OTHER; note = 2'-O-methyl ribonucleotide
  modified_base 70: mod_base = OTHER; note = 2'-O-methyl ribonucleotide
  modified_base 71: mod_base = OTHER; note = 2'-O-methyl ribonucleotide
  modified_base 72: mod_base = OTHER; note = 2'-O-methyl ribonucleotide
  modified_base 73: mod_base = OTHER; note = 2'-O-methyl ribonucleotide
  modified_base 74: mod_base = OTHER; note = 2'-O-methyl ribonucleotide
  modified_base 75: mod_base = OTHER; note = 2'-O-methyl ribonucleotide
  modified_base 76: mod_base = OTHER; note = 2'-O-methyl ribonucleotide
  modified_base 77: mod_base = OTHER; note = 2'-O-methyl ribonucleotide
  modified_base 78: mod_base = OTHER; note = 2'-O-methyl ribonucleotide
  modified_base 79: mod_base = OTHER; note = 2'-O-methyl ribonucleotide
  modified_base 80: mod_base = OTHER; note = 2'-O-methyl ribonucleotide
  modified_base 82: mod_base = OTHER; note = 2'-O-methyl ribonucleotide
  modified_base 83: mod_base = OTHER; note = 2'-O-methyl ribonucleotide
  modified_base 84: mod_base = OTHER; note = 2'-O-methyl ribonucleotide
  modified_base 85: mod_base = OTHER; note = 2'-O-methyl ribonucleotide
  modified_base 86: mod_base = OTHER; note = 2'-O-methyl ribonucleotide
  modified_base 87: mod_base = OTHER; note = 2'-O-methyl ribonucleotide
  modified_base 89: mod_base = OTHER; note = 2'-O-methyl ribonucleotide
  modified_base 91: mod_base = OTHER; note = 2'-O-methyl ribonucleotide
  modified_base 92: mod_base = OTHER; note = 2'-O-methyl ribonucleotide
  modified_base 93: mod_base = OTHER; note = 2'-O-methyl ribonucleotide
  modified_base 94: mod_base = OTHER; note = 2'-O-methyl ribonucleotide
  modified_base 95: mod_base = OTHER; note = 2'-O-methyl ribonucleotide
  modified_base 96: mod_base = OTHER; note = 2'-O-methyl ribonucleotide
  modified_base 97: mod_base = OTHER; note = 2'-O-methyl ribonucleotide
  modified_base 98: mod_base = OTHER; note = 2'-O-methyl ribonucleotide
  modified_base 99: mod_base = OTHER; note = 2'-O-methyl ribonucleotide
  modified_base 100: mod_base = OTHER; note = 2'-O-methyl ribonucleotide
  modified_base 1..3: mod_base = OTHER; note = phosphorothioate linkage
  modified_base 25..26: mod_base = OTHER; note = phosphorothioate linkage
  modified_base 45..46: mod_base = OTHER; note = phosphorothioate linkage
  modified_base 64..65: mod_base = OTHER; note = phosphorothioate linkage
  modified_base 98..100: mod_base = OTHER; note = phosphorothioate linkage

SEQ ID NO: 2793 - RNA, 103 nt, synthetic construct; identical to SEQ ID NO: 1700
  source 1..103: mol_type = other RNA
  modified_base 1: mod_base = OTHER; note = 2'-O-methyl ribonucleotide
  modified_base 2: mod_base = OTHER; note = 2'-O-methyl ribonucleotide
  modified_base 3: mod_base = OTHER; note = 2'-O-methyl ribonucleotide
  modified_base 21: mod_base = OTHER; note = 2'-O-methyl ribonucleotide
  modified_base 28: mod_base = OTHER; note = 2'-O-methyl ribonucleotide
  modified_base 29: mod_base = OTHER; note = 2'-O-methyl ribonucleotide
  modified_base 30: mod_base = OTHER; note = 2'-O-methyl ribonucleotide
  modified_base 31: mod_base = OTHER; note = 2'-O-methyl ribonucleotide
  modified_base 32: mod_base = OTHER; note = 2'-O-methyl ribonucleotide
  modified_base 34: mod_base = OTHER; note = 2'-O-methyl ribonucleotide
  modified_base 35: mod_base = OTHER; note = 2'-O-methyl ribonucleotide
  modified_base 36: mod_base = OTHER; note = 2'-O-methyl ribonucleotide
  modified_base 37: mod_base = OTHER; note = 2'-O-methyl ribonucleotide
  modified_base 38: mod_base = OTHER; note = 2'-O-methyl ribonucleotide
  modified_base 39: mod_base = OTHER; note = 2'-O-methyl ribonucleotide
  modified_base 40: mod_base = OTHER; note = 2'-O-methyl ribonucleotide
  modified_base 41: mod_base = OTHER; note = 2'-O-methyl ribonucleotide
  modified_base 42: mod_base = OTHER; note = 2'-O-methyl ribonucleotide
  modified_base 46: mod_base = OTHER; note = 2'-O-methyl ribonucleotide
  modified_base 48: mod_base = OTHER; note = 2'-O-methyl ribonucleotide
  modified_base 50: mod_base = OTHER; note = 2'-O-methyl ribonucleotide
  modified_base 52: mod_base = OTHER; note = 2'-O-methyl ribonucleotide
  modified_base 53: mod_base = OTHER; note = 2'-O-methyl ribonucleotide
  modified_base 54: mod_base = OTHER; note = 2'-O-methyl ribonucleotide
  modified_base 57: mod_base = OTHER; note = 2'-O-methyl ribonucleotide
  modified_base 61: mod_base = OTHER; note = 2'-O-methyl ribonucleotide
  modified_base 66: mod_base = OTHER; note = 2'-O-methyl ribonucleotide
  modified_base 67: mod_base = OTHER; note = 2'-O-methyl ribonucleotide
  modified_base 70: mod_base = OTHER; note = 2'-O-methyl ribonucleotide
  modified_base 71: mod_base = OTHER; note = 2'-O-methyl ribonucleotide
  modified_base 72: mod_base = OTHER; note = 2'-O-methyl ribonucleotide
  modified_base 73: mod_base = OTHER; note = 2'-O-methyl ribonucleotide
  modified_base 74: mod_base = OTHER; note = 2'-O-methyl ribonucleotide
  modified_base 75: mod_base = OTHER; note = 2'-O-methyl ribonucleotide
  modified_base 76: mod_base = OTHER; note = 2'-O-methyl ribonucleotide
  modified_base 77: mod_base = OTHER; note = 2'-O-methyl ribonucleotide
  modified_base 78: mod_base = OTHER; note = 2'-O-methyl ribonucleotide
  modified_base 79: mod_base = OTHER; note = 2'-O-methyl ribonucleotide
  modified_base 80: mod_base = OTHER; note = 2'-O-methyl ribonucleotide
  modified_base 82: mod_base = OTHER; note = 2'-O-methyl ribonucleotide
  modified_base 83: mod_base = OTHER; note = 2'-O-methyl ribonucleotide
  modified_base 84: mod_base = OTHER; note = 2'-O-methyl ribonucleotide
  modified_base 85: mod_base = OTHER; note = 2'-O-methyl ribonucleotide
  modified_base 86: mod_base = OTHER; note = 2'-O-methyl ribonucleotide
  modified_base 87: mod_base = OTHER; note = 2'-O-methyl ribonucleotide
  modified_base 89: mod_base = OTHER; note = 2'-O-methyl ribonucleotide
  modified_base 92: mod_base = OTHER; note = 2'-O-methyl ribonucleotide
  modified_base 93: mod_base = OTHER; note = 2'-O-methyl ribonucleotide
  modified_base 94: mod_base = OTHER; note = 2'-O-methyl ribonucleotide
  modified_base 95: mod_base = OTHER; note = 2'-O-methyl ribonucleotide
  modified_base 96: mod_base = OTHER; note = 2'-O-methyl ribonucleotide
  modified_base 97: mod_base = OTHER; note = 2'-O-methyl ribonucleotide
  modified_base 98: mod_base = OTHER; note = 2'-O-methyl ribonucleotide
  modified_base 99: mod_base = OTHER; note = 2'-O-methyl ribonucleotide
  modified_base 100: mod_base = OTHER; note = 2'-O-methyl ribonucleotide
  modified_base 1..3: mod_base = OTHER; note = phosphorothioate linkage
  modified_base 25..26: mod_base = OTHER; note = phosphorothioate linkage
  modified_base 45..46: mod_base = OTHER; note = phosphorothioate linkage
  modified_base 64..65: mod_base = OTHER; note = phosphorothioate linkage
  modified_base 98..100: mod_base = OTHER; note = phosphorothioate linkage

SEQ ID NO: 2794 - RNA, 103 nt, synthetic construct; identical to SEQ ID NO: 1700
  source 1..103: mol_type = other RNA
  modified_base 1: mod_base = OTHER; note = 2'-O-methyl ribonucleotide
  modified_base 2: mod_base = OTHER; note = 2'-O-methyl ribonucleotide
  modified_base 3: mod_base = OTHER; note = 2'-O-methyl ribonucleotide
  modified_base 21: mod_base = OTHER; note = 2'-O-methyl ribonucleotide
  modified_base 28: mod_base = OTHER; note = 2'-O-methyl ribonucleotide
  modified_base 29: mod_base = OTHER; note = 2'-O-methyl ribonucleotide
  modified_base 30: mod_base = OTHER; note = 2'-O-methyl ribonucleotide
  modified_base 31: mod_base = OTHER; note = 2'-O-methyl ribonucleotide
  modified_base 32: mod_base = OTHER; note = 2'-O-methyl ribonucleotide
  modified_base 34: mod_base = OTHER; note = 2'-O-methyl ribonucleotide
  modified_base 35: mod_base = OTHER; note = 2'-O-methyl ribonucleotide
  modified_base 36: mod_base = OTHER; note = 2'-O-methyl ribonucleotide
  modified_base 37: mod_base = OTHER; note = 2'-O-methyl ribonucleotide
  modified_base 38: mod_base = OTHER; note = 2'-O-methyl ribonucleotide
  modified_base 39: mod_base = OTHER; note = 2'-O-methyl ribonucleotide
  modified_base 40: mod_base = OTHER; note = 2'-O-methyl ribonucleotide
  modified_base 41: mod_base = OTHER; note = 2'-O-methyl ribonucleotide
  modified_base 42: mod_base = OTHER; note = 2'-O-methyl ribonucleotide
  modified_base 46: mod_base = OTHER; note = 2'-O-methyl ribonucleotide
  modified_base 48: mod_base = OTHER; note = 2'-O-methyl ribonucleotide
  modified_base 50: mod_base = OTHER; note = 2'-O-methyl ribonucleotide
  modified_base 52: mod_base = OTHER; note = 2'-O-methyl ribonucleotide
  modified_base 53: mod_base = OTHER; note = 2'-O-methyl ribonucleotide
  modified_base 54: mod_base = OTHER; note = 2'-O-methyl ribonucleotide
  modified_base 57: mod_base = OTHER; note = 2'-O-methyl ribonucleotide
  modified_base 61: mod_base = OTHER; note = 2'-O-methyl ribonucleotide
  modified_base 66: mod_base = OTHER; note = 2'-O-methyl ribonucleotide
  modified_base 67: mod_base = OTHER; note = 2'-O-methyl ribonucleotide
  modified_base 70: mod_base = OTHER; note = 2'-O-methyl ribonucleotide
  modified_base 71: mod_base = OTHER; note = 2'-O-methyl ribonucleotide
  modified_base 72: mod_base = OTHER; note = 2'-O-methyl ribonucleotide
  modified_base 73: mod_base = OTHER; note = 2'-O-methyl ribonucleotide
  modified_base 74: mod_base = OTHER; note = 2'-O-methyl ribonucleotide
  modified_base 75: mod_base = OTHER; note = 2'-O-methyl ribonucleotide
  modified_base 76: mod_base = OTHER; note = 2'-O-methyl ribonucleotide
  modified_base 77: mod_base = OTHER; note = 2'-O-methyl ribonucleotide
  modified_base 78: mod_base = OTHER; note = 2'-O-methyl ribonucleotide
  modified_base 79: mod_base = OTHER; note = 2'-O-methyl ribonucleotide
  modified_base 80: mod_base = OTHER; note = 2'-O-methyl ribonucleotide
  modified_base 82: mod_base = OTHER; note = 2'-O-methyl ribonucleotide
  modified_base 83: mod_base = OTHER; note = 2'-O-methyl ribonucleotide
  modified_base 84: mod_base = OTHER; note = 2'-O-methyl ribonucleotide
  modified_base 85: mod_base = OTHER; note = 2'-O-methyl ribonucleotide
  modified_base 86: mod_base = OTHER; note = 2'-O-methyl ribonucleotide
  modified_base 87: mod_base = OTHER; note = 2'-O-methyl ribonucleotide
  modified_base 89: mod_base = OTHER; note = 2'-O-methyl ribonucleotide
  modified_base 91: mod_base = OTHER; note = 2'-O-methyl ribonucleotide
  modified_base 92: mod_base = OTHER; note = 2'-O-methyl ribonucleotide
  modified_base 93: mod_base = OTHER; note = 2'-O-methyl ribonucleotide
  modified_base 94: mod_base = OTHER; note = 2'-O-methyl ribonucleotide
  modified_base 95: mod_base = OTHER; note = 2'-O-methyl ribonucleotide
  modified_base 96: mod_base = OTHER; note = 2'-O-methyl ribonucleotide
  modified_base 97: mod_base = OTHER; note = 2'-O-methyl ribonucleotide
  modified_base 98: mod_base = OTHER; note = 2'-O-methyl ribonucleotide
  modified_base 99: mod_base = OTHER; note = 2'-O-methyl ribonucleotide
  modified_base 100: mod_base = OTHER; note = 2'-O-methyl ribonucleotide
  modified_base 1..3: mod_base = OTHER; note = phosphorothioate linkage
  modified_base 25..26: mod_base = OTHER; note = phosphorothioate linkage
  modified_base 45..46: mod_base = OTHER; note = phosphorothioate linkage
  modified_base 64..65: mod_base = OTHER; note = phosphorothioate linkage
  modified_base 98..100: mod_base = OTHER; note = phosphorothioate linkage

SEQ ID NO: 2795 - RNA, 103 nt, synthetic construct; identical to SEQ ID NO: 1700
  source 1..103: mol_type = other RNA
  modified_base 1: mod_base = OTHER; note = 2'-O-methyl ribonucleotide
  modified_base 2: mod_base = OTHER; note = 2'-O-methyl ribonucleotide
  modified_base 3: mod_base = OTHER; note = 2'-O-methyl ribonucleotide
  modified_base 21: mod_base = OTHER; note = 2'-O-methyl ribonucleotide
  modified_base 28: mod_base = OTHER; note = 2'-O-methyl ribonucleotide
  modified_base 29: mod_base = OTHER; note = 2'-O-methyl ribonucleotide
  modified_base 30: mod_base = OTHER; note = 2'-O-methyl ribonucleotide
  modified_base 31: mod_base = OTHER; note = 2'-O-methyl ribonucleotide
  modified_base 32: mod_base = OTHER; note = 2'-O-methyl ribonucleotide
  modified_base 34: mod_base = OTHER; note = 2'-O-methyl ribonucleotide
  modified_base 35: mod_base = OTHER; note = 2'-O-methyl ribonucleotide
  modified_base 36: mod_base = OTHER; note = 2'-O-methyl ribonucleotide
  modified_base 37: mod_base = OTHER; note = 2'-O-methyl ribonucleotide
  modified_base 38: mod_base = OTHER; note = 2'-O-methyl ribonucleotide
  modified_base 39: mod_base = OTHER; note = 2'-O-methyl ribonucleotide
  modified_base 40: mod_base = OTHER; note = 2'-O-methyl ribonucleotide
  modified_base 41: mod_base = OTHER; note = 2'-O-methyl ribonucleotide
  modified_base 42: mod_base = OTHER; note = 2'-O-methyl ribonucleotide
  modified_base 46: mod_base = OTHER; note = 2'-O-methyl ribonucleotide
  modified_base 48: mod_base = OTHER; note = 2'-O-methyl ribonucleotide
  modified_base 50: mod_base = OTHER; note = 2'-O-methyl ribonucleotide
  modified_base 52: mod_base = OTHER; note = 2'-O-methyl ribonucleotide
  modified_base 53: mod_base = OTHER; note = 2'-O-methyl ribonucleotide
  modified_base 54: mod_base = OTHER; note = 2'-O-methyl ribonucleotide
  modified_base 55: mod_base = OTHER; note = 2'-O-methyl ribonucleotide
  modified_base 56: mod_base = OTHER; note = 2'-O-methyl ribonucleotide
  modified_base 57: mod_base = OTHER; note = 2'-O-methyl ribonucleotide
  modified_base 60: mod_base = OTHER; note = 2'-O-methyl ribonucleotide
  modified_base 61: mod_base = OTHER; note = 2'-O-methyl ribonucleotide
  modified_base 66: mod_base = OTHER; note = 2'-O-methyl ribonucleotide
  modified_base 67: mod_base = OTHER; note = 2'-O-methyl ribonucleotide
  modified_base 70: mod_base = OTHER; note = 2'-O-methyl ribonucleotide
  modified_base 71: mod_base = OTHER; note = 2'-O-methyl ribonucleotide
  modified_base 72: mod_base = OTHER; note = 2'-O-methyl ribonucleotide
  modified_base 74: mod_base = OTHER; note = 2'-O-methyl ribonucleotide
  modified_base 75: mod_base = OTHER; note = 2'-O-methyl ribonucleotide
  modified_base 76: mod_base = OTHER; note = 2'-O-methyl ribonucleotide
  modified_base 77: mod_base = OTHER; note = 2'-O-methyl ribonucleotide
  modified_base 78: mod_base = OTHER; note = 2'-O-methyl ribonucleotide
  modified_base 79: mod_base = OTHER; note = 2'-O-methyl ribonucleotide
  modified_base 80: mod_base = OTHER; note = 2'-O-methyl ribonucleotide
  modified_base 82: mod_base = OTHER; note = 2'-O-methyl ribonucleotide
  modified_base 83: mod_base = OTHER; note = 2'-O-methyl ribonucleotide
  modified_base 84: mod_base = OTHER; note = 2'-O-methyl ribonucleotide
  modified_base 85: mod_base = OTHER; note = 2'-O-methyl ribonucleotide
  modified_base 86: mod_base = OTHER; note = 2'-O-methyl ribonucleotide
  modified_base 87: mod_base = OTHER; note = 2'-O-methyl ribonucleotide
  modified_base 89: mod_base = OTHER; note = 2'-O-methyl ribonucleotide
  modified_base 92: mod_base = OTHER; note = 2'-O-methyl ribonucleotide
  modified_base 93: mod_base = OTHER; note = 2'-O-methyl ribonucleotide
  modified_base 94: mod_base = OTHER; note = 2'-O-methyl ribonucleotide
  modified_base 95: mod_base = OTHER; note = 2'-O-methyl ribonucleotide
  modified_base 96: mod_base = OTHER; note = 2'-O-methyl ribonucleotide
  modified_base 97: mod_base = OTHER; note = 2'-O-methyl ribonucleotide
  modified_base 98: mod_base = OTHER; note = 2'-O-methyl ribonucleotide
  modified_base 99: mod_base = OTHER; note = 2'-O-methyl ribonucleotide
  modified_base 100: mod_base = OTHER; note = 2'-O-methyl ribonucleotide
  modified_base 1..3: mod_base = OTHER; note = phosphorothioate linkage
  modified_base 25..26: mod_base = OTHER; note = phosphorothioate linkage
  modified_base 45..46: mod_base = OTHER; note = phosphorothioate linkage
  modified_base 64..65: mod_base = OTHER; note = phosphorothioate linkage
  modified_base 98..100: mod_base = OTHER; note = phosphorothioate linkage

SEQ ID NO: 2796 - DNA, 103 bp, synthetic construct; identical to SEQ ID NO: 1795
  source 1..103: mol_type = other DNA
  modified_base 1: mod_base = OTHER; note = 2'-O-methyl ribonucleotide
  modified_base 2: mod_base = OTHER; note = 2'-O-methyl ribonucleotide
  modified_base 3: mod_base = OTHER; note = 2'-O-methyl ribonucleotide
  modified_base 21: mod_base = OTHER; note = 2'-O-methyl ribonucleotide
  modified_base 28: mod_base = OTHER; note = 2'-O-methyl ribonucleotide
  modified_base 29: mod_base = OTHER; note = 2'-O-methyl ribonucleotide
  modified_base 30: mod_base = OTHER; note = 2'-O-methyl ribonucleotide
  modified_base 31: mod_base = OTHER; note = 2'-O-methyl ribonucleotide
  modified_base 32: mod_base = OTHER; note = 2'-O-methyl ribonucleotide
  modified_base 33: mod_base = OTHER; note = 2'-O-methyl ribonucleotide
  modified_base 34: mod_base = OTHER; note = 2'-O-methyl ribonucleotide
  modified_base 35: mod_base = OTHER; note = 2'-O-methyl ribonucleotide
  modified_base 36: mod_base = OTHER; note = 2'-O-methyl ribonucleotide
  modified_base 37: mod_base = OTHER; note = 2'-O-methyl ribonucleotide
  modified_base 38: mod_base = OTHER; note = 2'-O-methyl ribonucleotide
  modified_base 39: mod_base = OTHER; note = 2'-O-methyl ribonucleotide
  modified_base 40: mod_base = OTHER; note = 2'-O-methyl ribonucleotide
  modified_base 41: mod_base = OTHER; note = 2'-O-methyl ribonucleotide
  modified_base 42: mod_base = OTHER; note = 2'-O-methyl ribonucleotide
  modified_base 46: mod_base = OTHER; note = 2'-O-methyl ribonucleotide
  modified_base 48: mod_base = OTHER; note = 2'-O-methyl ribonucleotide
  modified_base 50: mod_base = OTHER; note = 2'-O-methyl ribonucleotide
  modified_base 52: mod_base = OTHER; note = 2'-O-methyl ribonucleotide
  modified_base 53: mod_base = OTHER; note = 2'-O-methyl ribonucleotide
  modified_base 54: mod_base = OTHER; note = 2'-O-methyl ribonucleotide
  modified_base 55: mod_base = OTHER; note = 2'-O-methyl ribonucleotide
  modified_base 56: mod_base = OTHER; note = 2'-O-methyl ribonucleotide
  modified_base 57: mod_base = OTHER; note = 2'-O-methyl ribonucleotide
  modified_base 60: mod_base = OTHER; note = 2'-O-methyl ribonucleotide
  modified_base 61: mod_base = OTHER; note = 2'-O-methyl ribonucleotide
  modified_base 66: mod_base = OTHER; note = 2'-O-methyl ribonucleotide
  modified_base 67: mod_base = OTHER; note = 2'-O-methyl ribonucleotide
  modified_base 70: mod_base = OTHER; note = 2'-O-methyl ribonucleotide
  modified_base 71: mod_base = OTHER; note = 2'-O-methyl ribonucleotide
  modified_base 72: mod_base = OTHER; note = 2'-O-methyl ribonucleotide
  modified_base 73: mod_base = OTHER; note = 2'-O-methyl ribonucleotide
  modified_base 74: mod_base = OTHER; note = 2'-O-methyl ribonucleotide
  modified_base 75: mod_base = OTHER; note = 2'-O-methyl ribonucleotide
  modified_base 76: mod_base = OTHER; note = 2'-O-methyl ribonucleotide
  modified_base 77: mod_base = OTHER; note = 2'-O-methyl ribonucleotide
  modified_base 78: mod_base = OTHER; note = 2'-O-methyl ribonucleotide
  modified_base 79: mod_base = OTHER; note = 2'-O-methyl ribonucleotide
  modified_base 80: mod_base = OTHER; note = 2'-O-methyl ribonucleotide
  modified_base 81: mod_base = OTHER; note = 2'-O-methyl ribonucleotide
  modified_base 83: mod_base = OTHER; note = 2'-O-methyl ribonucleotide
  modified_base 84: mod_base = OTHER; note = 2'-O-methyl ribonucleotide
  modified_base 85: mod_base = OTHER; note = 2'-O-methyl ribonucleotide
  modified_base 86: mod_base = OTHER; note = 2'-O-methyl ribonucleotide
  modified_base 87: mod_base = OTHER; note = 2'-O-methyl ribonucleotide
  modified_base 88: mod_base = OTHER; note = 2'-O-methyl ribonucleotide
  modified_base 89: mod_base = OTHER; note = 2'-O-methyl ribonucleotide
  modified_base 90: mod_base = OTHER; note = 2'-O-methyl ribonucleotide
  modified_base 91: mod_base = OTHER; note = 2'-O-methyl ribonucleotide
  modified_base 92: mod_base = OTHER; note = 2'-O-methyl ribonucleotide
  modified_base 93: mod_base = OTHER; note = 2'-O-methyl ribonucleotide
  modified_base 94: mod_base = OTHER; note = 2'-O-methyl ribonucleotide
  modified_base 95: mod_base = OTHER; note = 2'-O-methyl ribonucleotide
  modified_base 96: mod_base = OTHER; note = 2'-O-methyl ribonucleotide
  modified_base 97: mod_base = OTHER; note = 2'-O-methyl ribonucleotide
  modified_base 98: mod_base = OTHER; note = 2'-O-methyl ribonucleotide
  modified_base 99: mod_base = OTHER; note = 2'-O-methyl ribonucleotide
  modified_base 100: mod_base = OTHER; note = 2'-O-methyl ribonucleotide
  modified_base 101: mod_base = OTHER; note = uniform ribonucleotides (A, C, G, inosine or U), deoxynucleotides (A, G, C, inosine or T), ribonebularine, 2'-O-methylnebularine or deoxynebularine
  modified_base 102: mod_base = OTHER; note = uniform ribonucleotides (A, C, G, inosine or U), deoxynucleotides (A, G, C, inosine or T), ribonebularine, 2'-O-methylnebularine or deoxynebularine
  modified_base 103: mod_base = OTHER; note = uniform ribonucleotides (A, C, G, inosine or U), deoxynucleotides (A, G, C, inosine or T), ribonebularine, 2'-O-methylnebularine or deoxynebularine
  modified_base 1..4: mod_base = OTHER; note = phosphorothioate linkage
  modified_base 97..100: mod_base = OTHER; note = phosphorothioate linkage
  misc_feature 1..100: note = RNA
  misc_feature 101..103: note = Optionally DNA or RNA

SEQ ID NO: 2797 - DNA, 103 bp, synthetic construct; identical to SEQ ID NO: 1795
  source 1..103: mol_type = other DNA
  modified_base 1: mod_base = OTHER; note = 2'-O-methyl ribonucleotide
  modified_base 2: mod_base = OTHER; note = 2'-O-methyl ribonucleotide
  modified_base 3: mod_base = OTHER; note = 2'-O-methyl ribonucleotide
  modified_base 21: mod_base = OTHER; note = 2'-O-methyl ribonucleotide
  modified_base 28: mod_base = OTHER; note = 2'-O-methyl ribonucleotide
  modified_base 29: mod_base = OTHER; note = 2'-O-methyl ribonucleotide
  modified_base 30: mod_base = OTHER; note = 2'-O-methyl ribonucleotide
  modified_base 31: mod_base = OTHER; note = 2'-O-methyl ribonucleotide
  modified_base 32: mod_base = OTHER; note = 2'-O-methyl ribonucleotide
  modified_base 34: mod_base = OTHER; note = 2'-O-methyl ribonucleotide
  modified_base 35: mod_base = OTHER; note = 2'-O-methyl ribonucleotide
  modified_base 36: mod_base = OTHER; note = 2'-O-methyl ribonucleotide
  modified_base 37: mod_base = OTHER; note = 2'-O-methyl ribonucleotide
  modified_base 38: mod_base = OTHER; note = 2'-O-methyl ribonucleotide
  modified_base 39: mod_base = OTHER; note = 2'-O-methyl ribonucleotide
  modified_base 40: mod_base = OTHER; note = 2'-O-methyl ribonucleotide
  modified_base 41: mod_base = OTHER; note = 2'-O-methyl ribonucleotide
  modified_base 42: mod_base = OTHER; note = 2'-O-methyl ribonucleotide
  modified_base 46: mod_base = OTHER; note = 2'-O-methyl ribonucleotide
  modified_base 48: mod_base = OTHER; note = 2'-O-methyl ribonucleotide
  modified_base 50: mod_base = OTHER; note = 2'-O-methyl ribonucleotide
  modified_base 52: mod_base = OTHER; note = 2'-O-methyl ribonucleotide
  modified_base 53: mod_base = OTHER; note = 2'-O-methyl ribonucleotide
  modified_base 54: mod_base = OTHER; note = 2'-O-methyl ribonucleotide
  modified_base 55: mod_base = OTHER; note = 2'-O-methyl ribonucleotide
  modified_base 56: mod_base = OTHER; note = 2'-O-methyl ribonucleotide
  modified_base 57: mod_base = OTHER; note = 2'-O-methyl ribonucleotide
  modified_base 60: mod_base = OTHER; note = 2'-O-methyl ribonucleotide
  modified_base 61: mod_base = OTHER; note = 2'-O-methyl ribonucleotide
  modified_base 66: mod_base = OTHER; note = 2'-O-methyl ribonucleotide
  modified_base 67: mod_base = OTHER; note = 2'-O-methyl ribonucleotide
  modified_base 70: mod_base = OTHER; note = 2'-O-methyl ribonucleotide
  modified_base 71: mod_base = OTHER; note = 2'-O-methyl ribonucleotide
  modified_base 72: mod_base = OTHER; note = 2'-O-methyl ribonucleotide
  modified_base 74: mod_base = OTHER; note = 2'-O-methyl ribonucleotide
  modified_base 75: mod_base = OTHER; note = 2'-O-methyl ribonucleotide
  modified_base 76: mod_base = OTHER; note = 2'-O-methyl ribonucleotide
  modified_base 77: mod_base = OTHER; note = 2'-O-methyl ribonucleotide
  modified_base 78: mod_base = OTHER; note = 2'-O-methyl ribonucleotide
  modified_base 79: mod_base = OTHER; note = 2'-O-methyl ribonucleotide
  modified_base 80: mod_base = OTHER; note = 2'-O-methyl ribonucleotide
  modified_base 81: mod_base = OTHER; note = 2'-O-methyl ribonucleotide
  modified_base 83: mod_base = OTHER; note = 2'-O-methyl ribonucleotide
  modified_base 84: mod_base = OTHER; note = 2'-O-methyl ribonucleotide
  modified_base 85: mod_base = OTHER; note = 2'-O-methyl ribonucleotide
  modified_base 86: mod_base = OTHER; note = 2'-O-methyl ribonucleotide
  modified_base 87: mod_base = OTHER; note = 2'-O-methyl ribonucleotide
  modified_base 88: mod_base = OTHER; note = 2'-O-methyl ribonucleotide
  modified_base 89: mod_base = OTHER; note = 2'-O-methyl ribonucleotide
  modified_base 90: mod_base = OTHER; note = 2'-O-methyl ribonucleotide
  modified_base 91: mod_base = OTHER; note = 2'-O-methyl ribonucleotide
  modified_base 92: mod_base = OTHER; note = 2'-O-methyl ribonucleotide
  modified_base 93: mod_base = OTHER; note = 2'-O-methyl ribonucleotide
  modified_base 94: mod_base = OTHER; note = 2'-O-methyl ribonucleotide
  modified_base 95: mod_base = OTHER; note = 2'-O-methyl ribonucleotide
  modified_base 96: mod_base = OTHER; note = 2'-O-methyl ribonucleotide
  modified_base 97: mod_base = OTHER; note = 2'-O-methyl ribonucleotide
  modified_base 98: mod_base = OTHER; note = 2'-O-methyl ribonucleotide
  modified_base 99: mod_base = OTHER; note = 2'-O-methyl ribonucleotide
  modified_base 100: mod_base = OTHER; note = 2'-O-methyl ribonucleotide
  modified_base 101: mod_base = OTHER; note = uniform ribonucleotides (A, C, G, inosine or U), deoxynucleotides (A, G, C, inosine or T), ribonebularine, 2'-O-methylnebularine or deoxynebularine
  modified_base 102: mod_base = OTHER; note = uniform ribonucleotides (A, C, G, inosine or U), deoxynucleotides (A, G, C, inosine or T), ribonebularine, 2'-O-methylnebularine or deoxynebularine
  modified_base 103: mod_base = OTHER; note = uniform ribonucleotides (A, C, G, inosine or U), deoxynucleotides (A, G, C, inosine or T), ribonebularine, 2'-O-methylnebularine or deoxynebularine
  modified_base 1..4: mod_base = OTHER; note = phosphorothioate linkage
  modified_base 97..100: mod_base = OTHER; note = phosphorothioate linkage
  misc_feature 1..100: note = RNA
  misc_feature 101..103: note = Optionally DNA or RNA

SEQ ID NO: 2798 - DNA, 103 bp, synthetic construct; identical to SEQ ID NO: 1796
  source 1..103: mol_type = other DNA
  modified_base 1: mod_base = OTHER; note = 2'-O-methyl ribonucleotide
  modified_base 2: mod_base = OTHER; note = 2'-O-methyl ribonucleotide
  modified_base 3: mod_base = OTHER; note = 2'-O-methyl ribonucleotide
  modified_base 21: mod_base = OTHER; note = 2'-O-methyl ribonucleotide
  modified_base 28: mod_base = OTHER; note = 2'-O-methyl ribonucleotide
  modified_base 29: mod_base = OTHER; note = 2'-O-methyl ribonucleotide
  modified_base 30: mod_base = OTHER; note = 2'-O-methyl ribonucleotide
  modified_base 31: mod_base = OTHER; note = 2'-O-methyl ribonucleotide
  modified_base 32: mod_base = OTHER; note = 2'-O-methyl ribonucleotide
  modified_base 33: mod_base = OTHER; note = 2'-O-methyl ribonucleotide
  modified_base 34: mod_base = OTHER; note = 2'-O-methyl ribonucleotide
  modified_base 35: mod_base = OTHER; note = 2'-O-methyl ribonucleotide
  modified_base 36: mod_base = OTHER; note = 2'-O-methyl ribonucleotide
  modified_base 37: mod_base = OTHER; note = 2'-O-methyl ribonucleotide
  modified_base 38: mod_base = OTHER; note = 2'-O-methyl ribonucleotide
  modified_base 39: mod_base = OTHER; note = 2'-O-methyl ribonucleotide
  modified_base 40: mod_base = OTHER; note = 2'-O-methyl ribonucleotide
  modified_base 41: mod_base = OTHER; note = 2'-O-methyl ribonucleotide
  modified_base 42: mod_base = OTHER; note = 2'-O-methyl ribonucleotide
  modified_base 46: mod_base = OTHER; note = 2'-O-methyl ribonucleotide
  modified_base 48: mod_base = OTHER; note = 2'-O-methyl ribonucleotide
  modified_base 50: mod_base = OTHER; note = 2'-O-methyl ribonucleotide
  modified_base 52: mod_base = OTHER; note = 2'-O-methyl ribonucleotide
  modified_base 53: mod_base = OTHER; note = 2'-O-methyl ribonucleotide
  modified_base 54: mod_base = OTHER; note = 2'-O-methyl ribonucleotide
  modified_base 55: mod_base = OTHER; note = 2'-O-methyl ribonucleotide
  modified_base 56: mod_base = OTHER; note = 2'-O-methyl ribonucleotide
  modified_base 57: mod_base = OTHER; note = 2'-O-methyl ribonucleotide
  modified_base 60: mod_base = OTHER; note = 2'-O-methyl ribonucleotide
  modified_base 61: mod_base = OTHER; note = 2'-O-methyl ribonucleotide
  modified_base 66: mod_base = OTHER; note = 2'-O-methyl ribonucleotide
  modified_base 67: mod_base = OTHER; note = 2'-O-methyl ribonucleotide
  modified_base 70: mod_base = OTHER; note = 2'-O-methyl ribonucleotide
  modified_base 71: mod_base = OTHER; note = 2'-O-methyl ribonucleotide
  modified_base 72: mod_base = OTHER; note = 2'-O-methyl ribonucleotide
  modified_base 73: mod_base = OTHER; note = 2'-O-methyl ribonucleotide
  modified_base 74: mod_base = OTHER; note = 2'-O-methyl ribonucleotide
  modified_base 75: mod_base = OTHER; note = 2'-O-methyl ribonucleotide
  modified_base 76: mod_base = OTHER; note = 2'-O-methyl ribonucleotide
  modified_base 77: mod_base = OTHER; note = 2'-O-methyl ribonucleotide
  modified_base 78: mod_base = OTHER; note = 2'-O-methyl ribonucleotide
  modified_base 79: mod_base = OTHER; note = 2'-O-methyl ribonucleotide
  modified_base 80: mod_base = OTHER; note = 2'-O-methyl ribonucleotide
  modified_base 81: mod_base = OTHER; note = 2'-O-methyl ribonucleotide
  modified_base 83: mod_base = OTHER; note = 2'-O-methyl ribonucleotide
  modified_base 84: mod_base = OTHER; note = 2'-O-methyl ribonucleotide
  modified_base 85: mod_base = OTHER; note = 2'-O-methyl ribonucleotide
  modified_base 86: mod_base = OTHER; note = 2'-O-methyl ribonucleotide
  modified_base 87: mod_base = OTHER; note = 2'-O-methyl ribonucleotide
  modified_base 88: mod_base = OTHER; note = 2'-O-methyl ribonucleotide
  modified_base 89: mod_base = OTHER; note = 2'-O-methyl ribonucleotide
  modified_base 90: mod_base = OTHER; note = 2'-O-methyl ribonucleotide
  modified_base 91: mod_base = OTHER; note = 2'-O-methyl ribonucleotide
  modified_base 92: mod_base = OTHER; note = 2'-O-methyl ribonucleotide
  modified_base 93: mod_base = OTHER; note = 2'-O-methyl ribonucleotide
  modified_base 94: mod_base = OTHER; note = 2'-O-methyl ribonucleotide
  modified_base 95: mod_base = OTHER; note = 2'-O-methyl ribonucleotide
  modified_base 96: mod_base = OTHER; note = 2'-O-methyl ribonucleotide
  modified_base 97: mod_base = OTHER; note = 2'-O-methyl ribonucleotide
  modified_base 98: mod_base = OTHER; note = 2'-O-methyl ribonucleotide
  modified_base 99: mod_base = OTHER; note = 2'-O-methyl ribonucleotide
  modified_base 100: mod_base = OTHER; note = 2'-O-methyl ribonucleotide
  modified_base 101: mod_base = OTHER; note = uniform ribonucleotides (A, C, G, inosine or U), deoxynucleotides (A, G, C, inosine or T), ribonebularine, 2'-O-methylnebularine or deoxynebularine
  modified_base 102: mod_base = OTHER; note = uniform ribonucleotides (A, C, G, inosine or U), deoxynucleotides (A, G, C, inosine or T), ribonebularine, 2'-O-methylnebularine or deoxynebularine
  modified_base 103: mod_base = OTHER; note = uniform ribonucleotides (A, C, G, inosine or U), deoxynucleotides (A, G, C, inosine or T), ribonebularine, 2'-O-methylnebularine or deoxynebularine
  modified_base 1..4: mod_base = OTHER; note = phosphorothioate linkage
  modified_base 97..100: mod_base = OTHER; note = phosphorothioate linkage
  misc_feature 1..100: note = RNA
  misc_feature 101..103: note = Optionally DNA or RNA

SEQ ID NO: 2799 - DNA, 103 bp, synthetic construct; identical to SEQ ID NO: 1796
  source 1..103: mol_type = other DNA
  modified_base 1: mod_base = OTHER; note = 2'-O-methyl ribonucleotide
  modified_base 2: mod_base = OTHER; note = 2'-O-methyl ribonucleotide
  modified_base 3: mod_base = OTHER; note = 2'-O-methyl ribonucleotide
  modified_base 21: mod_base = OTHER; note = 2'-O-methyl ribonucleotide
  modified_base 28: mod_base = OTHER; note = 2'-O-methyl ribonucleotide
  modified_base 29: mod_base = OTHER; note = 2'-O-methyl ribonucleotide
  modified_base 30: mod_base = OTHER; note = 2'-O-methyl ribonucleotide
  modified_base 31: mod_base = OTHER; note = 2'-O-methyl ribonucleotide
  modified_base 32: mod_base = OTHER; note = 2'-O-methyl ribonucleotide
  modified_base 34: mod_base = OTHER; note = 2'-O-methyl ribonucleotide
  modified_base 35: mod_base = OTHER; note = 2'-O-methyl ribonucleotide
  modified_base 36: mod_base = OTHER; note = 2'-O-methyl ribonucleotide
  modified_base 37: mod_base = OTHER; note = 2'-O-methyl ribonucleotide
  modified_base 38: mod_base = OTHER; note = 2'-O-methyl ribonucleotide
  modified_base 39: mod_base = OTHER; note = 2'-O-methyl ribonucleotide
  modified_base 40: mod_base = OTHER; note = 2'-O-methyl ribonucleotide
  modified_base 41: mod_base = OTHER; note = 2'-O-methyl ribonucleotide
  modified_base 42: mod_base = OTHER; note = 2'-O-methyl ribonucleotide
  modified_base 46: mod_base = OTHER; note = 2'-O-methyl ribonucleotide
  modified_base 48: mod_base = OTHER; note = 2'-O-methyl ribonucleotide
  modified_base 50: mod_base = OTHER; note = 2'-O-methyl ribonucleotide
  modified_base 52: mod_base = OTHER; note = 2'-O-methyl ribonucleotide
  modified_base 53: mod_base = OTHER; note = 2'-O-methyl ribonucleotide
  modified_base 54: mod_base = OTHER; note = 2'-O-methyl ribonucleotide
  modified_base 55: mod_base = OTHER; note = 2'-O-methyl ribonucleotide
  modified_base 56: mod_base = OTHER; note = 2'-O-methyl ribonucleotide
  modified_base 57: mod_base = OTHER; note = 2'-O-methyl ribonucleotide
  modified_base 60: mod_base = OTHER; note = 2'-O-methyl ribonucleotide
  modified_base 61: mod_base = OTHER; note = 2'-O-methyl ribonucleotide
  modified_base 66: mod_base = OTHER; note = 2'-O-methyl ribonucleotide
  modified_base 67: mod_base = OTHER; note = 2'-O-methyl ribonucleotide
  modified_base 70: mod_base = OTHER; note = 2'-O-methyl ribonucleotide
  modified_base 71: mod_base = OTHER; note = 2'-O-methyl ribonucleotide
  modified_base 72: mod_base = OTHER; note = 2'-O-methyl ribonucleotide
  modified_base 74: mod_base = OTHER; note = 2'-O-methyl ribonucleotide
  modified_base 75: mod_base = OTHER; note = 2'-O-methyl ribonucleotide
  modified_base 76: mod_base = OTHER; note = 2'-O-methyl ribonucleotide
  modified_base 77: mod_base = OTHER; note = 2'-O-methyl ribonucleotide
  modified_base 78: mod_base = OTHER; note = 2'-O-methyl ribonucleotide
  modified_base 79: mod_base = OTHER; note = 2'-O-methyl ribonucleotide
  modified_base 80: mod_base = OTHER; note = 2'-O-methyl ribonucleotide
  modified_base 81: mod_base = OTHER; note = 2'-O-methyl ribonucleotide
  modified_base 83: mod_base = OTHER; note = 2'-O-methyl ribonucleotide
  modified_base 84: mod_base = OTHER; note = 2'-O-methyl ribonucleotide
  modified_base 85: mod_base = OTHER; note = 2'-O-methyl ribonucleotide
  modified_base 86: mod_base = OTHER; note = 2'-O-methyl ribonucleotide
  modified_base 87: mod_base = OTHER; note = 2'-O-methyl ribonucleotide
  modified_base 88: mod_base = OTHER; note = 2'-O-methyl ribonucleotide
  modified_base 89: mod_base = OTHER; note = 2'-O-methyl ribonucleotide
  modified_base 90: mod_base = OTHER; note = 2'-O-methyl ribonucleotide
  modified_base 91: mod_base = OTHER; note = 2'-O-methyl ribonucleotide
  modified_base 92: mod_base = OTHER; note = 2'-O-methyl ribonucleotide
  modified_base 93: mod_base = OTHER; note = 2'-O-methyl ribonucleotide
  modified_base 94: mod_base = OTHER; note = 2'-O-methyl ribonucleotide
  modified_base 95: mod_base = OTHER; note = 2'-O-methyl ribonucleotide
  modified_base 96: mod_base = OTHER; note = 2'-O-methyl ribonucleotide
  modified_base 97: mod_base = OTHER; note = 2'-O-methyl ribonucleotide
  modified_base 98: mod_base = OTHER; note = 2'-O-methyl ribonucleotide
  modified_base 99: mod_base = OTHER; note = 2'-O-methyl ribonucleotide
  modified_base 100: mod_base = OTHER; note = 2'-O-methyl ribonucleotide
  modified_base 101: mod_base = OTHER; note = uniform ribonucleotides (A, C, G, inosine or U), deoxynucleotides (A, G, C, inosine or T), ribonebularine, 2'-O-methylnebularine or deoxynebularine
  modified_base 102: mod_base = OTHER; note = uniform ribonucleotides (A, C, G, inosine or U), deoxynucleotides (A, G, C, inosine or T), ribonebularine, 2'-O-methylnebularine or deoxynebularine
  modified_base 103: mod_base = OTHER; note = uniform ribonucleotides (A, C, G, inosine or U), deoxynucleotides (A, G, C, inosine or T), ribonebularine, 2'-O-methylnebularine or deoxynebularine
  modified_base 1..4: mod_base = OTHER; note = phosphorothioate linkage
  modified_base 97..100: mod_base = OTHER; note = phosphorothioate linkage
  misc_feature 1..100: note = RNA
  misc_feature 101..103: note = Optionally DNA or RNA

SEQ ID NO: 2800 - DNA, 103 bp, synthetic construct; identical to SEQ ID NO: 1797
  source 1..103: mol_type = other DNA
  modified_base 1: mod_base = OTHER; note = 2'-O-methyl ribonucleotide
  modified_base 2: mod_base = OTHER; note = 2'-O-methyl ribonucleotide
  modified_base 3: mod_base = OTHER; note = 2'-O-methyl ribonucleotide
  modified_base 21: mod_base = OTHER; note = 2'-O-methyl ribonucleotide
  modified_base 28: mod_base = OTHER; note = 2'-O-methyl ribonucleotide
  modified_base 29: mod_base = OTHER; note = 2'-O-methyl ribonucleotide
  modified_base 30: mod_base = OTHER; note = 2'-O-methyl ribonucleotide
  modified_base 31: mod_base = OTHER; note = 2'-O-methyl ribonucleotide
  modified_base 32: mod_base = OTHER; note = 2'-O-methyl ribonucleotide
  modified_base 33: mod_base = OTHER; note = 2'-O-methyl ribonucleotide
  modified_base 34: mod_base = OTHER; note = 2'-O-methyl ribonucleotide
  modified_base 35: mod_base = OTHER; note = 2'-O-methyl ribonucleotide
  modified_base 36: mod_base = OTHER; note = 2'-O-methyl ribonucleotide
  modified_base 37: mod_base = OTHER; note = 2'-O-methyl ribonucleotide
  modified_base 38: mod_base = OTHER; note = 2'-O-methyl ribonucleotide
  modified_base 39: mod_base = OTHER; note = 2'-O-methyl ribonucleotide
  modified_base 40: mod_base = OTHER; note = 2'-O-methyl ribonucleotide
  modified_base 41: mod_base = OTHER; note = 2'-O-methyl ribonucleotide
  modified_base 42: mod_base = OTHER; note = 2'-O-methyl ribonucleotide
  modified_base 46: mod_base = OTHER; note = 2'-O-methyl ribonucleotide
  modified_base 48: mod_base = OTHER; note = 2'-O-methyl ribonucleotide
  modified_base 50: mod_base = OTHER; note = 2'-O-methyl ribonucleotide
  modified_base 52: mod_base = OTHER; note = 2'-O-methyl ribonucleotide
  modified_base 53: mod_base = OTHER; note = 2'-O-methyl ribonucleotide
  modified_base 54: mod_base = OTHER; note = 2'-O-methyl ribonucleotide
  modified_base 57: mod_base = OTHER; note = 2'-O-methyl ribonucleotide
  modified_base 61: mod_base = OTHER; note = 2'-O-methyl ribonucleotide
  modified_base 66: mod_base = OTHER; note = 2'-O-methyl ribonucleotide
  modified_base 67: mod_base = OTHER; note = 2'-O-methyl ribonucleotide
  modified_base 70: mod_base = OTHER; note = 2'-O-methyl ribonucleotide
  modified_base 71: mod_base = OTHER; note = 2'-O-methyl ribonucleotide
  modified_base 72: mod_base = OTHER; note = 2'-O-methyl ribonucleotide
  modified_base 74: mod_base = OTHER; note = 2'-O-methyl ribonucleotide
  modified_base 75: mod_base = OTHER; note = 2'-O-methyl ribonucleotide
  modified_base 76: mod_base = OTHER; note = 2'-O-methyl ribonucleotide
  modified_base 77: mod_base = OTHER; note = 2'-O-methyl ribonucleotide
  modified_base 78: mod_base = OTHER; note = 2'-O-methyl ribonucleotide
  modified_base 79: mod_base = OTHER; note = 2'-O-methyl ribonucleotide
  modified_base 80: mod_base = OTHER; note = 2'-O-methyl ribonucleotide
  modified_base 82: mod_base = OTHER; note = 2'-O-methyl ribonucleotide
  modified_base 83: mod_base = OTHER; note = 2'-O-methyl ribonucleotide
  modified_base 84: mod_base = OTHER; note = 2'-O-methyl ribonucleotide
  modified_base 85: mod_base = OTHER; note = 2'-O-methyl ribonucleotide
  modified_base 86: mod_base = OTHER; note = 2'-O-methyl ribonucleotide
  modified_base 87: mod_base = OTHER; note = 2'-O-methyl ribonucleotide
  modified_base 89: mod_base = OTHER; note = 2'-O-methyl ribonucleotide
  modified_base 92: mod_base = OTHER; note = 2'-O-methyl ribonucleotide
  modified_base 93: mod_base = OTHER; note = 2'-O-methyl ribonucleotide
  modified_base 94: mod_base = OTHER; note = 2'-O-methyl ribonucleotide
  modified_base 95: mod_base = OTHER; note = 2'-O-methyl ribonucleotide
  modified_base 96: mod_base = OTHER; note = 2'-O-methyl ribonucleotide
  modified_base 97: mod_base = OTHER; note = 2'-O-methyl ribonucleotide
  modified_base 98: mod_base = OTHER; note = 2'-O-methyl ribonucleotide
  modified_base 99: mod_base = OTHER; note = 2'-O-methyl ribonucleotide
  modified_base 100: mod_base = OTHER; note = 2'-O-methyl ribonucleotide
  modified_base 101: mod_base = OTHER; note = uniform ribonucleotides (A, C, G, inosine or U), deoxynucleotides (A, G, C, inosine or T), ribonebularine, 2'-O-methylnebularine or deoxynebularine
  modified_base 102: mod_base = OTHER; note = uniform ribonucleotides (A, C, G, inosine or U), deoxynucleotides (A, G, C, inosine or T), ribonebularine, 2'-O-methylnebularine or deoxynebularine
  modified_base 103: mod_base = OTHER; note = uniform ribonucleotides (A, C, G, inosine or U), deoxynucleotides (A, G, C, inosine or T), ribonebularine, 2'-O-methylnebularine or deoxynebularine
  modified_base 1..4: mod_base = OTHER; note = phosphorothioate linkage
  modified_base 97..100: mod_base = OTHER; note = phosphorothioate linkage
  misc_feature 1..100: note = RNA
  misc_feature 101..103: note = Optionally DNA or RNA

SEQ ID NO: 2801 - DNA, 103 bp, synthetic construct; identical to SEQ ID NO: 1797
  source 1..103: mol_type = other DNA
  modified_base 1: mod_base = OTHER; note = 2'-O-methyl ribonucleotide
  modified_base 2: mod_base = OTHER; note = 2'-O-methyl ribonucleotide
  modified_base 3: mod_base = OTHER; note = 2'-O-methyl ribonucleotide
  modified_base 21: mod_base = OTHER; note = 2'-O-methyl ribonucleotide
  modified_base 28: mod_base = OTHER; note = 2'-O-methyl ribonucleotide
  modified_base 29: mod_base = OTHER; note = 2'-O-methyl ribonucleotide
  modified_base 30: mod_base = OTHER; note = 2'-O-methyl ribonucleotide
  modified_base 31: mod_base = OTHER; note = 2'-O-methyl ribonucleotide
  modified_base 32: mod_base = OTHER; note = 2'-O-methyl ribonucleotide
  modified_base 33: mod_base = OTHER; note = 2'-O-methyl ribonucleotide
  modified_base 34: mod_base = OTHER; note = 2'-O-methyl ribonucleotide
  modified_base 35: mod_base = OTHER; note = 2'-O-methyl ribonucleotide
  modified_base 36: mod_base = OTHER; note = 2'-O-methyl ribonucleotide
  modified_base 37: mod_base = OTHER; note = 2'-O-methyl ribonucleotide
  modified_base 38: mod_base = OTHER; note = 2'-O-methyl ribonucleotide
  modified_base 39: mod_base = OTHER; note = 2'-O-methyl ribonucleotide
  modified_base 40: mod_base = OTHER; note = 2'-O-methyl ribonucleotide
  modified_base 41: mod_base = OTHER; note = 2'-O-methyl ribonucleotide
  modified_base 42: mod_base = OTHER; note = 2'-O-methyl ribonucleotide
  modified_base 46: mod_base = OTHER; note = 2'-O-methyl ribonucleotide
  modified_base 48: mod_base = OTHER; note = 2'-O-methyl ribonucleotide
  modified_base 50: mod_base = OTHER; note = 2'-O-methyl ribonucleotide
  modified_base 52: mod_base = OTHER; note = 2'-O-methyl ribonucleotide
  modified_base 53: mod_base = OTHER; note = 2'-O-methyl ribonucleotide
  modified_base 54: mod_base = OTHER; note = 2'-O-methyl ribonucleotide
  modified_base 55: mod_base = OTHER; note = 2'-O-methyl ribonucleotide
  modified_base 56: mod_base = OTHER; note = 2'-O-methyl ribonucleotide
  modified_base 57: mod_base = OTHER; note = 2'-O-methyl ribonucleotide
  modified_base 60: mod_base = OTHER; note = 2'-O-methyl ribonucleotide
  modified_base 61: mod_base = OTHER; note = 2'-O-methyl ribonucleotide
  modified_base 66: mod_base = OTHER; note = 2'-O-methyl ribonucleotide
  modified_base 67: mod_base = OTHER; note = 2'-O-methyl ribonucleotide
  modified_base 70: mod_base = OTHER; note = 2'-O-methyl ribonucleotide
  modified_base 71: mod_base = OTHER; note = 2'-O-methyl ribonucleotide
  modified_base 72: mod_base = OTHER; note = 2'-O-methyl ribonucleotide
  modified_base 74: mod_base = OTHER; note = 2'-O-methyl ribonucleotide
  modified_base 75: mod_base = OTHER; note = 2'-O-methyl ribonucleotide
  modified_base 76: mod_base = OTHER; note = 2'-O-methyl ribonucleotide
  modified_base 77: mod_base = OTHER; note = 2'-O-methyl ribonucleotide
  modified_base 78: mod_base = OTHER; note = 2'-O-methyl ribonucleotide
  modified_base 79: mod_base = OTHER; note = 2'-O-methyl ribonucleotide
  modified_base 80: mod_base = OTHER; note = 2'-O-methyl ribonucleotide
  modified_base 82: mod_base = OTHER; note = 2'-O-methyl ribonucleotide
  modified_base 83: mod_base = OTHER; note = 2'-O-methyl ribonucleotide
  modified_base 84: mod_base = OTHER; note = 2'-O-methyl ribonucleotide
  modified_base 85: mod_base = OTHER; note = 2'-O-methyl ribonucleotide
  modified_base 86: mod_base = OTHER; note = 2'-O-methyl ribonucleotide
  modified_base 87: mod_base = OTHER; note = 2'-O-methyl ribonucleotide
  modified_base 89: mod_base = OTHER; note = 2'-O-methyl ribonucleotide
  modified_base 92: mod_base = OTHER; note = 2'-O-methyl ribonucleotide
  modified_base 93: mod_base = OTHER; note = 2'-O-methyl ribonucleotide
  modified_base 94: mod_base = OTHER; note = 2'-O-methyl ribonucleotide
  modified_base 95: mod_base = OTHER; note = 2'-O-methyl ribonucleotide
  modified_base 96: mod_base = OTHER; note = 2'-O-methyl ribonucleotide
  modified_base 97: mod_base = OTHER; note = 2'-O-methyl ribonucleotide
  modified_base 98: mod_base = OTHER; note = 2'-O-methyl ribonucleotide
  modified_base 99: mod_base = OTHER; note = 2'-O-methyl ribonucleotide
  modified_base 100: mod_base = OTHER; note = 2'-O-methyl ribonucleotide
  modified_base 101: mod_base = OTHER; note = uniform ribonucleotides (A, C, G, inosine or U), deoxynucleotides (A, G, C, inosine or T), ribonebularine, 2'-O-methylnebularine or deoxynebularine
  modified_base 102: mod_base = OTHER; note = uniform ribonucleotides (A, C, G, inosine or U), deoxynucleotides (A, G, C, inosine or T), ribonebularine, 2'-O-methylnebularine or deoxynebularine
  modified_base 103: mod_base = OTHER; note = uniform ribonucleotides (A, C, G, inosine or U), deoxynucleotides (A, G, C, inosine or T), ribonebularine, 2'-O-methylnebularine or deoxynebularine
  modified_base 1..4: mod_base = OTHER; note = phosphorothioate linkage
  modified_base 97..100: mod_base = OTHER; note = phosphorothioate linkage
  misc_feature 1..100: note = RNA
  misc_feature 101..103: note = Optionally DNA or RNA

SEQ ID NO: 2802 - DNA, 103 bp, synthetic construct; identical to SEQ ID NO: 1797
  source 1..103: mol_type = other DNA
  modified_base 1: mod_base = OTHER; note = 2'-O-methyl ribonucleotide
  modified_base 2: mod_base = OTHER; note = 2'-O-methyl ribonucleotide
  modified_base 3: mod_base = OTHER; note = 2'-O-methyl ribonucleotide
  modified_base 21: mod_base = OTHER; note = 2'-O-methyl ribonucleotide
  modified_base 28: mod_base = OTHER; note = 2'-O-methyl ribonucleotide
  modified_base 29: mod_base = OTHER; note = 2'-O-methyl ribonucleotide
  modified_base 30: mod_base = OTHER; note = 2'-O-methyl ribonucleotide
  modified_base 31: mod_base = OTHER; note = 2'-O-methyl ribonucleotide
  modified_base 32: mod_base = OTHER; note = 2'-O-methyl ribonucleotide
  modified_base 33: mod_base = OTHER; note = 2'-O-methyl ribonucleotide
  modified_base 34: mod_base = OTHER; note = 2'-O-methyl ribonucleotide
  modified_base 35: mod_base = OTHER; note = 2'-O-methyl ribonucleotide
  modified_base 36: mod_base = OTHER; note = 2'-O-methyl ribonucleotide
  modified_base 37: mod_base = OTHER; note = 2'-O-methyl ribonucleotide
  modified_base 38: mod_base = OTHER; note = 2'-O-methyl ribonucleotide
  modified_base 39: mod_base = OTHER; note = 2'-O-methyl ribonucleotide
  modified_base 40: mod_base = OTHER; note = 2'-O-methyl ribonucleotide
  modified_base 41: mod_base = OTHER; note = 2'-O-methyl ribonucleotide
  modified_base 42: mod_base = OTHER; note = 2'-O-methyl ribonucleotide
  modified_base 46: mod_base = OTHER; note = 2'-O-methyl ribonucleotide
  modified_base 48: mod_base = OTHER; note = 2'-O-methyl ribonucleotide
  modified_base 50: mod_base = OTHER; note = 2'-O-methyl ribonucleotide
  modified_base 52: mod_base = OTHER; note = 2'-O-methyl ribonucleotide
  modified_base 53: mod_base = OTHER; note = 2'-O-methyl ribonucleotide
  modified_base 54: mod_base = OTHER; note = 2'-O-methyl ribonucleotide
  modified_base 57: mod_base = OTHER; note = 2'-O-methyl ribonucleotide
  modified_base 61: mod_base = OTHER; note = 2'-O-methyl ribonucleotide
  modified_base 66: mod_base = OTHER; note = 2'-O-methyl ribonucleotide
  modified_base 67: mod_base = OTHER; note = 2'-O-methyl ribonucleotide
  modified_base 70: mod_base = OTHER; note = 2'-O-methyl ribonucleotide
  modified_base 71: mod_base = OTHER; note = 2'-O-methyl ribonucleotide
  modified_base 72: mod_base = OTHER; note = 2'-O-methyl ribonucleotide
  modified_base 73: mod_base = OTHER; note = 2'-O-methyl ribonucleotide
  modified_base 74: mod_base = OTHER; note = 2'-O-methyl ribonucleotide
  modified_base 75: mod_base = OTHER; note = 2'-O-methyl ribonucleotide
  modified_base 76: mod_base = OTHER; note = 2'-O-methyl ribonucleotide
  modified_base 77: mod_base = OTHER; note = 2'-O-methyl ribonucleotide
  modified_base 78: mod_base = OTHER; note = 2'-O-methyl ribonucleotide
  modified_base 79: mod_base = OTHER; note = 2'-O-methyl ribonucleotide
  modified_base 80: mod_base = OTHER; note = 2'-O-methyl ribonucleotide
  modified_base 82: mod_base = OTHER; note = 2'-O-methyl ribonucleotide
  modified_base 83: mod_base = OTHER; note = 2'-O-methyl ribonucleotide
  modified_base 84: mod_base = OTHER; note = 2'-O-methyl ribonucleotide
  modified_base 85: mod_base = OTHER; note = 2'-O-methyl ribonucleotide
  modified_base 86: mod_base = OTHER; note = 2'-O-methyl ribonucleotide
  modified_base 87: mod_base = OTHER; note = 2'-O-methyl ribonucleotide
  modified_base 89: mod_base = OTHER; note = 2'-O-methyl ribonucleotide
  modified_base 92: mod_base = OTHER; note = 2'-O-methyl ribonucleotide
  modified_base 93: mod_base = OTHER; note = 2'-O-methyl ribonucleotide
  modified_base 94: mod_base = OTHER; note = 2'-O-methyl ribonucleotide
  modified_base 95: mod_base = OTHER; note = 2'-O-methyl ribonucleotide
  modified_base 96: mod_base = OTHER; note = 2'-O-methyl ribonucleotide
  modified_base 97: mod_base = OTHER; note = 2'-O-methyl ribonucleotide
  modified_base 98: mod_base = OTHER; note = 2'-O-methyl ribonucleotide
  modified_base 99: mod_base = OTHER; note = 2'-O-methyl ribonucleotide
  modified_base 100: mod_base = OTHER; note = 2'-O-methyl ribonucleotide
  modified_base 101: mod_base = OTHER; note = uniform ribonucleotides (A, C, G, inosine or U), deoxynucleotides (A, G, C, inosine or T), ribonebularine, 2'-O-methylnebularine or deoxynebularine
  modified_base 102: mod_base = OTHER; note = uniform ribonucleotides (A, C, G, inosine or U), deoxynucleotides (A, G, C, inosine or T), ribonebularine, 2'-O-methylnebularine or deoxynebularine
  modified_base 103: mod_base = OTHER; note = uniform ribonucleotides (A, C, G, inosine or U), deoxynucleotides (A, G, C, inosine or T), ribonebularine, 2'-O-methylnebularine or deoxynebularine
  modified_base 1..4: mod_base = OTHER; note = phosphorothioate linkage
  modified_base 97..100: mod_base = OTHER; note = phosphorothioate linkage
  misc_feature 1..100: note = RNA
  misc_feature 101..103: note = Optionally DNA or RNA

SEQ ID NO: 2803 - DNA, 103 bp, synthetic construct; identical to SEQ ID NO: 1797
  source 1..103: mol_type = other DNA
  modified_base 1: mod_base = OTHER; note = 2'-O-methyl ribonucleotide
  modified_base 2: mod_base = OTHER; note = 2'-O-methyl ribonucleotide
  modified_base 3: mod_base = OTHER; note = 2'-O-methyl ribonucleotide
  modified_base 21: mod_base = OTHER; note = 2'-O-methyl ribonucleotide
  modified_base 28: mod_base = OTHER; note = 2'-O-methyl ribonucleotide
  modified_base 29: mod_base = OTHER; note = 2'-O-methyl ribonucleotide
  modified_base 30: mod_base = OTHER; note = 2'-O-methyl ribonucleotide
  modified_base 31: mod_base = OTHER; note = 2'-O-methyl ribonucleotide
  modified_base 32: mod_base = OTHER; note = 2'-O-methyl ribonucleotide
  modified_base 33: mod_base = OTHER; note = 2'-O-methyl ribonucleotide
  modified_base 34: mod_base = OTHER; note = 2'-O-methyl ribonucleotide
  modified_base 35: mod_base = OTHER; note = 2'-O-methyl ribonucleotide
  modified_base 36: mod_base = OTHER; note = 2'-O-methyl ribonucleotide
  modified_base 37: mod_base = OTHER; note = 2'-O-methyl ribonucleotide
  modified_base 38: mod_base = OTHER; note = 2'-O-methyl ribonucleotide
  modified_base 39: mod_base = OTHER; note = 2'-O-methyl ribonucleotide
  modified_base 40: mod_base = OTHER; note = 2'-O-methyl ribonucleotide
  modified_base 41: mod_base = OTHER; note = 2'-O-methyl ribonucleotide
  modified_base 42: mod_base = OTHER; note = 2'-O-methyl ribonucleotide
  modified_base 46: mod_base = OTHER; note = 2'-O-methyl ribonucleotide
  modified_base 48: mod_base = OTHER; note = 2'-O-methyl ribonucleotide
  modified_base 50: mod_base = OTHER; note = 2'-O-methyl ribonucleotide
  modified_base 52: mod_base = OTHER; note = 2'-O-methyl ribonucleotide
  modified_base 53: mod_base = OTHER; note = 2'-O-methyl ribonucleotide
  modified_base 54: mod_base = OTHER; note = 2'-O-methyl ribonucleotide
  modified_base 57: mod_base = OTHER; note = 2'-O-methyl ribonucleotide
  modified_base 61: mod_base = OTHER; note = 2'-O-methyl ribonucleotide
  modified_base 66: mod_base = OTHER; note = 2'-O-methyl ribonucleotide
  modified_base 67: mod_base = OTHER; note = 2'-O-methyl ribonucleotide
  modified_base 70: mod_base = OTHER; note = 2'-O-methyl ribonucleotide
  modified_base 71: mod_base = OTHER; note = 2'-O-methyl ribonucleotide
  modified_base 72: mod_base = OTHER; note = 2'-O-methyl ribonucleotide
  modified_base 73: mod_base = OTHER; note = 2'-O-methyl ribonucleotide
  modified_base 74: mod_base = OTHER; note = 2'-O-methyl ribonucleotide
  modified_base 75: mod_base = OTHER; note = 2'-O-methyl ribonucleotide
  modified_base 76: mod_base = OTHER; note = 2'-O-methyl ribonucleotide
  modified_base 77: mod_base = OTHER; note = 2'-O-methyl ribonucleotide
  modified_base 78: mod_base = OTHER; note = 2'-O-methyl ribonucleotide
  modified_base 79: mod_base = OTHER; note = 2'-O-methyl ribonucleotide
  modified_base 80: mod_base = OTHER; note = 2'-O-methyl ribonucleotide
  modified_base 82: mod_base = OTHER; note = 2'-O-methyl ribonucleotide
  modified_base 83: mod_base = OTHER; note = 2'-O-methyl ribonucleotide
  modified_base 84: mod_base = OTHER; note = 2'-O-methyl ribonucleotide
  modified_base 85: mod_base = OTHER; note = 2'-O-methyl ribonucleotide
  modified_base 86: mod_base = OTHER; note = 2'-O-methyl ribonucleotide
  modified_base 87: mod_base = OTHER; note = 2'-O-methyl ribonucleotide
  modified_base 89: mod_base = OTHER; note = 2'-O-methyl ribonucleotide
  modified_base 91: mod_base = OTHER; note = 2'-O-methyl ribonucleotide
  modified_base 92: mod_base = OTHER; note = 2'-O-methyl ribonucleotide
  modified_base 93: mod_base = OTHER; note = 2'-O-methyl ribonucleotide
  modified_base 94: mod_base = OTHER; note = 2'-O-methyl ribonucleotide
  modified_base 95: mod_base = OTHER; note = 2'-O-methyl ribonucleotide
  modified_base 96: mod_base = OTHER; note = 2'-O-methyl ribonucleotide
  modified_base 97: mod_base = OTHER; note = 2'-O-methyl ribonucleotide
  modified_base 98: mod_base = OTHER; note = 2'-O-methyl ribonucleotide
  modified_base 99: mod_base = OTHER; note = 2'-O-methyl ribonucleotide
  modified_base 100: mod_base = OTHER; note = 2'-O-methyl ribonucleotide
  modified_base 101: mod_base = OTHER; note = uniform ribonucleotides (A, C, G, inosine or U), deoxynucleotides (A, G, C, inosine or T), ribonebularine, 2'-O-methylnebularine or deoxynebularine
  modified_base 102: mod_base = OTHER; note = uniform ribonucleotides (A, C, G, inosine or U), deoxynucleotides (A, G, C, inosine or T), ribonebularine, 2'-O-methylnebularine or deoxynebularine
  modified_base 103: mod_base = OTHER; note = uniform ribonucleotides (A, C, G, inosine or U), deoxynucleotides (A, G, C, inosine or T), ribonebularine, 2'-O-methylnebularine or deoxynebularine
  modified_base 1..4: mod_base = OTHER; note = phosphorothioate linkage
  modified_base 97..100: mod_base = OTHER; note = phosphorothioate linkage
  misc_feature 1..100: note = RNA
  misc_feature 101..103: note = Optionally DNA or RNA

SEQ ID NO: 2804 - DNA, 103 bp, synthetic construct; identical to SEQ ID NO: 1797
  source 1..103: mol_type = other DNA
  modified_base 1: mod_base = OTHER; note = 2'-O-methyl ribonucleotide
  modified_base 2: mod_base = OTHER; note = 2'-O-methyl ribonucleotide
  modified_base 3: mod_base = OTHER; note = 2'-O-methyl ribonucleotide
  modified_base 21: mod_base = OTHER; note = 2'-O-methyl ribonucleotide
  modified_base 28: mod_base = OTHER; note = 2'-O-methyl ribonucleotide
  modified_base 29: mod_base = OTHER; note = 2'-O-methyl ribonucleotide
  modified_base 30: mod_base = OTHER; note = 2'-O-methyl ribonucleotide
  modified_base 31: mod_base = OTHER; note = 2'-O-methyl ribonucleotide
  modified_base 32: mod_base = OTHER; note = 2'-O-methyl ribonucleotide
  modified_base 34: mod_base = OTHER; note = 2'-O-methyl ribonucleotide
  modified_base 35: mod_base = OTHER; note = 2'-O-methyl ribonucleotide
  modified_base 36: mod_base = OTHER; note = 2'-O-methyl ribonucleotide
  modified_base 37: mod_base = OTHER; note = 2'-O-methyl ribonucleotide
  modified_base 38: mod_base = OTHER; note = 2'-O-methyl ribonucleotide
  modified_base 39: mod_base = OTHER; note = 2'-O-methyl ribonucleotide
  modified_base 40: mod_base = OTHER; note = 2'-O-methyl ribonucleotide
  modified_base 41: mod_base = OTHER; note = 2'-O-methyl ribonucleotide
  modified_base 42: mod_base = OTHER; note = 2'-O-methyl ribonucleotide
  modified_base 46: mod_base = OTHER; note = 2'-O-methyl ribonucleotide
  modified_base 48: mod_base = OTHER; note = 2'-O-methyl ribonucleotide
  modified_base 50: mod_base = OTHER; note = 2'-O-methyl ribonucleotide
  modified_base 52: mod_base = OTHER; note = 2'-O-methyl ribonucleotide
  modified_base 53: mod_base = OTHER; note = 2'-O-methyl ribonucleotide
  modified_base 54: mod_base = OTHER; note = 2'-O-methyl ribonucleotide
  modified_base 57: mod_base = OTHER; note = 2'-O-methyl ribonucleotide
  modified_base 61: mod_base = OTHER; note = 2'-O-methyl ribonucleotide
  modified_base 66: mod_base = OTHER; note = 2'-O-methyl ribonucleotide
  modified_base 67: mod_base = OTHER; note = 2'-O-methyl ribonucleotide
  modified_base 70: mod_base = OTHER; note = 2'-O-methyl ribonucleotide
  modified_base 71: mod_base = OTHER; note = 2'-O-methyl ribonucleotide
  modified_base 72: mod_base = OTHER; note = 2'-O-methyl ribonucleotide
  modified_base 73: mod_base = OTHER; note = 2'-O-methyl ribonucleotide
  modified_base 74: mod_base = OTHER; note = 2'-O-methyl ribonucleotide
  modified_base 75: mod_base = OTHER; note = 2'-O-methyl ribonucleotide
  modified_base 76: mod_base = OTHER; note = 2'-O-methyl ribonucleotide
  modified_base 77: mod_base = OTHER; note = 2'-O-methyl ribonucleotide
  modified_base 78: mod_base = OTHER; note = 2'-O-methyl ribonucleotide
  modified_base 79: mod_base = OTHER; note = 2'-O-methyl ribonucleotide
  modified_base 80: mod_base = OTHER; note = 2'-O-methyl ribonucleotide
  modified_base 82: mod_base = OTHER; note = 2'-O-methyl ribonucleotide
  modified_base 83: mod_base = OTHER; note = 2'-O-methyl ribonucleotide
  modified_base 84: mod_base = OTHER; note = 2'-O-methyl ribonucleotide
  modified_base 85: mod_base = OTHER; note = 2'-O-methyl ribonucleotide
  modified_base 86: mod_base = OTHER; note = 2'-O-methyl ribonucleotide
  modified_base 87: mod_base = OTHER; note = 2'-O-methyl ribonucleotide
  modified_base 89: mod_base = OTHER; note = 2'-O-methyl ribonucleotide
  modified_base 92: mod_base = OTHER; note = 2'-O-methyl ribonucleotide
  modified_base 93: mod_base = OTHER; note = 2'-O-methyl ribonucleotide
  modified_base 94: mod_base = OTHER; note = 2'-O-methyl ribonucleotide
  modified_base 95: mod_base = OTHER; note = 2'-O-methyl ribonucleotide
  modified_base 96: mod_base = OTHER; note = 2'-O-methyl ribonucleotide
  modified_base 97: mod_base = OTHER; note = 2'-O-methyl ribonucleotide
  modified_base 98: mod_base = OTHER; note = 2'-O-methyl ribonucleotide
  modified_base 99: mod_base = OTHER; note = 2'-O-methyl ribonucleotide
  modified_base 100: mod_base = OTHER; note = 2'-O-methyl ribonucleotide
  modified_base 101: mod_base = OTHER; note = uniform ribonucleotides (A, C, G, inosine or U), deoxynucleotides (A, G, C, inosine or T), ribonebularine, 2'-O-methylnebularine or deoxynebularine
  modified_base 102: mod_base = OTHER; note = uniform ribonucleotides (A, C, G, inosine or U), deoxynucleotides (A, G, C, inosine or T), ribonebularine, 2'-O-methylnebularine or deoxynebularine
  modified_base 103: mod_base = OTHER; note = uniform ribonucleotides (A, C, G, inosine or U), deoxynucleotides (A, G, C, inosine or T), ribonebularine, 2'-O-methylnebularine or deoxynebularine
  modified_base 1..4: mod_base = OTHER; note = phosphorothioate linkage
  modified_base 97..100: mod_base = OTHER; note = phosphorothioate linkage
  misc_feature 1..100: note = RNA
  misc_feature 101..103: note = Optionally DNA or RNA

SEQ ID NO: 2805 - DNA, 103 bp, synthetic construct; identical to SEQ ID NO: 1797
  source 1..103: mol_type = other DNA
  modified_base 1: mod_base = OTHER; note = 2'-O-methyl ribonucleotide
  modified_base 2: mod_base = OTHER; note = 2'-O-methyl ribonucleotide
  modified_base 3: mod_base = OTHER; note = 2'-O-methyl ribonucleotide
  modified_base 21: mod_base = OTHER; note = 2'-O-methyl ribonucleotide
  modified_base 28: mod_base = OTHER; note = 2'-O-methyl ribonucleotide
  modified_base 29: mod_base = OTHER; note = 2'-O-methyl ribonucleotide
  modified_base 30: mod_base = OTHER; note = 2'-O-methyl ribonucleotide
  modified_base 31: mod_base = OTHER; note = 2'-O-methyl ribonucleotide
  modified_base 32: mod_base = OTHER; note = 2'-O-methyl ribonucleotide
  modified_base 34: mod_base = OTHER; note = 2'-O-methyl ribonucleotide
  modified_base 35: mod_base = OTHER; note = 2'-O-methyl ribonucleotide
  modified_base 36: mod_base = OTHER; note = 2'-O-methyl ribonucleotide
  modified_base 37: mod_base = OTHER; note = 2'-O-methyl ribonucleotide
  modified_base 38: mod_base = OTHER; note = 2'-O-methyl ribonucleotide
  modified_base 39: mod_base = OTHER; note = 2'-O-methyl ribonucleotide
  modified_base 40: mod_base = OTHER; note = 2'-O-methyl ribonucleotide
  modified_base 41: mod_base = OTHER; note = 2'-O-methyl ribonucleotide
  modified_base 42: mod_base = OTHER; note = 2'-O-methyl ribonucleotide
  modified_base 46: mod_base = OTHER; note = 2'-O-methyl ribonucleotide
  modified_base 48: mod_base = OTHER; note = 2'-O-methyl ribonucleotide
  modified_base 50: mod_base = OTHER; note = 2'-O-methyl ribonucleotide
  modified_base 52: mod_base = OTHER; note = 2'-O-methyl ribonucleotide
  modified_base 53: mod_base = OTHER; note = 2'-O-methyl ribonucleotide
  modified_base 54: mod_base = OTHER; note = 2'-O-methyl ribonucleotide
  modified_base 57: mod_base = OTHER; note = 2'-O-methyl ribonucleotide
  modified_base 61: mod_base = OTHER; note = 2'-O-methyl ribonucleotide
  modified_base 66: mod_base = OTHER; note = 2'-O-methyl ribonucleotide
  modified_base 67: mod_base = OTHER; note = 2'-O-methyl ribonucleotide
  modified_base 70: mod_base = OTHER; note = 2'-O-methyl ribonucleotide
  modified_base 71: mod_base = OTHER; note = 2'-O-methyl ribonucleotide
  modified_base 72: mod_base = OTHER; note = 2'-O-methyl ribonucleotide
  modified_base 73: mod_base = OTHER; note = 2'-O-methyl ribonucleotide
  modified_base 74: mod_base = OTHER; note = 2'-O-methyl ribonucleotide
  modified_base 75: mod_base = OTHER; note = 2'-O-methyl ribonucleotide
  modified_base 76: mod_base = OTHER; note = 2'-O-methyl ribonucleotide
  modified_base 77: mod_base = OTHER; note = 2'-O-methyl ribonucleotide
  modified_base 78: mod_base = OTHER; note = 2'-O-methyl ribonucleotide
  modified_base 79: mod_base = OTHER; note = 2'-O-methyl ribonucleotide
  modified_base 80: mod_base = OTHER; note = 2'-O-methyl ribonucleotide
  modified_base 82: mod_base = OTHER; note = 2'-O-methyl ribonucleotide
  modified_base 83: mod_base = OTHER; note = 2'-O-methyl ribonucleotide
  modified_base 84: mod_base = OTHER; note = 2'-O-methyl ribonucleotide
  modified_base 85: mod_base = OTHER; note = 2'-O-methyl ribonucleotide
  modified_base 86: mod_base = OTHER; note = 2'-O-methyl ribonucleotide
  modified_base 87: mod_base = OTHER; note = 2'-O-methyl ribonucleotide
  modified_base 89: mod_base = OTHER; note = 2'-O-methyl ribonucleotide
  modified_base 91: mod_base = OTHER; note = 2'-O-methyl ribonucleotide
  modified_base 92: mod_base = OTHER; note = 2'-O-methyl ribonucleotide
  modified_base 93: mod_base = OTHER; note = 2'-O-methyl ribonucleotide
  modified_base 94: mod_base = OTHER; note = 2'-O-methyl ribonucleotide
  modified_base 95: mod_base = OTHER; note = 2'-O-methyl ribonucleotide
  modified_base 96: mod_base = OTHER; note = 2'-O-methyl ribonucleotide
  modified_base 97: mod_base = OTHER; note = 2'-O-methyl ribonucleotide
  modified_base 98: mod_base = OTHER; note = 2'-O-methyl ribonucleotide
  modified_base 99: mod_base = OTHER; note = 2'-O-methyl ribonucleotide
  modified_base 100: mod_base = OTHER; note = 2'-O-methyl ribonucleotide
  modified_base 101: mod_base = OTHER; note = uniform ribonucleotides (A, C, G, inosine or U), deoxynucleotides (A, G, C, inosine or T), ribonebularine, 2'-O-methylnebularine or deoxynebularine
  modified_base 102: mod_base = OTHER; note = uniform ribonucleotides (A, C, G, inosine or U), deoxynucleotides (A, G, C, inosine or T), ribonebularine, 2'-O-methylnebularine or deoxynebularine
  modified_base 103: mod_base = OTHER; note = uniform ribonucleotides (A, C, G, inosine or U), deoxynucleotides (A, G, C, inosine or T), ribonebularine, 2'-O-methylnebularine or deoxynebularine
  modified_base 1..4: mod_base = OTHER; note = phosphorothioate linkage
  modified_base 97..100: mod_base = OTHER; note = phosphorothioate linkage
  misc_feature 1..100: note = RNA
  misc_feature 101..103: note = Optionally DNA or RNA

SEQ ID NO: 2806 - DNA, 103 bp, synthetic construct; identical to SEQ ID NO: 1797
  source 1..103: mol_type = other DNA
  modified_base 1: mod_base = OTHER; note = 2'-O-methyl ribonucleotide
  modified_base 2: mod_base = OTHER; note = 2'-O-methyl ribonucleotide
  modified_base 3: mod_base = OTHER; note = 2'-O-methyl ribonucleotide
  modified_base 21: mod_base = OTHER; note = 2'-O-methyl ribonucleotide
  modified_base 28: mod_base = OTHER; note = 2'-O-methyl ribonucleotide
  modified_base 29: mod_base = OTHER; note = 2'-O-methyl ribonucleotide
  modified_base 30: mod_base = OTHER; note = 2'-O-methyl ribonucleotide
  modified_base 31: mod_base = OTHER; note = 2'-O-methyl ribonucleotide
  modified_base 32: mod_base = OTHER; note = 2'-O-methyl ribonucleotide
  modified_base 34: mod_base = OTHER; note = 2'-O-methyl ribonucleotide
  modified_base 35: mod_base = OTHER; note = 2'-O-methyl ribonucleotide
  modified_base 36: mod_base = OTHER; note = 2'-O-methyl ribonucleotide
  modified_base 37: mod_base = OTHER; note = 2'-O-methyl ribonucleotide
  modified_base 38: mod_base = OTHER; note = 2'-O-methyl ribonucleotide
  modified_base 39: mod_base = OTHER; note = 2'-O-methyl ribonucleotide
  modified_base 40: mod_base = OTHER; note = 2'-O-methyl ribonucleotide
  modified_base 41: mod_base = OTHER; note = 2'-O-methyl ribonucleotide
  modified_base 42: mod_base = OTHER; note = 2'-O-methyl ribonucleotide
  modified_base 46: mod_base = OTHER; note = 2'-O-methyl ribonucleotide
  modified_base 48: mod_base = OTHER; note = 2'-O-methyl ribonucleotide
  modified_base 50: mod_base = OTHER; note = 2'-O-methyl ribonucleotide
  modified_base 52: mod_base = OTHER; note = 2'-O-methyl ribonucleotide
  modified_base 53: mod_base = OTHER; note = 2'-O-methyl ribonucleotide
  modified_base 54: mod_base = OTHER; note = 2'-O-methyl ribonucleotide
  modified_base 55: mod_base = OTHER; note = 2'-O-methyl ribonucleotide
  modified_base 56: mod_base = OTHER; note = 2'-O-methyl ribonucleotide
  modified_base 57: mod_base = OTHER; note = 2'-O-methyl ribonucleotide
  modified_base 60: mod_base = OTHER; note = 2'-O-methyl ribonucleotide
  modified_base 61: mod_base = OTHER; note = 2'-O-methyl ribonucleotide
  modified_base 66: mod_base = OTHER; note = 2'-O-methyl ribonucleotide
  modified_base 67: mod_base = OTHER; note = 2'-O-methyl ribonucleotide
  modified_base 70: mod_base = OTHER; note = 2'-O-methyl ribonucleotide
  modified_base 71: mod_base = OTHER; note = 2'-O-methyl ribonucleotide
  modified_base 72: mod_base = OTHER; note = 2'-O-methyl ribonucleotide
  modified_base 74: mod_base = OTHER; note = 2'-O-methyl ribonucleotide
  modified_base 75: mod_base = OTHER; note = 2'-O-methyl ribonucleotide
  modified_base 76: mod_base = OTHER; note = 2'-O-methyl ribonucleotide
  modified_base 77: mod_base = OTHER; note = 2'-O-methyl ribonucleotide
  modified_base 78: mod_base = OTHER; note = 2'-O-methyl ribonucleotide
  modified_base 79: mod_base = OTHER; note = 2'-O-methyl ribonucleotide
  modified_base 80: mod_base = OTHER; note = 2'-O-methyl ribonucleotide
  modified_base 82: mod_base = OTHER; note = 2'-O-methyl ribonucleotide
  modified_base 83: mod_base = OTHER; note = 2'-O-methyl ribonucleotide
  modified_base 84: mod_base = OTHER; note = 2'-O-methyl ribonucleotide
  modified_base 85: mod_base = OTHER; note = 2'-O-methyl ribonucleotide
  modified_base 86: mod_base = OTHER; note = 2'-O-methyl ribonucleotide
  modified_base 87: mod_base = OTHER; note = 2'-O-methyl ribonucleotide
  modified_base 89: mod_base = OTHER; note = 2'-O-methyl ribonucleotide
  modified_base 92: mod_base = OTHER; note = 2'-O-methyl ribonucleotide
  modified_base 93: mod_base = OTHER; note = 2'-O-methyl ribonucleotide
  modified_base 94: mod_base = OTHER; note = 2'-O-methyl ribonucleotide
  modified_base 95: mod_base = OTHER; note = 2'-O-methyl ribonucleotide
  modified_base 96: mod_base = OTHER; note = 2'-O-methyl ribonucleotide
  modified_base 97: mod_base = OTHER; note = 2'-O-methyl ribonucleotide
  modified_base 98: mod_base = OTHER; note = 2'-O-methyl ribonucleotide
  modified_base 99: mod_base = OTHER; note = 2'-O-methyl ribonucleotide
  modified_base 100: mod_base = OTHER; note = 2'-O-methyl ribonucleotide
  modified_base 101: mod_base = OTHER; note = uniform ribonucleotides (A, C, G, inosine or U), deoxynucleotides (A, G, C, inosine or T), ribonebularine, 2'-O-methylnebularine or deoxynebularine
  modified_base 102: mod_base = OTHER; note = uniform ribonucleotides (A, C, G, inosine or U), deoxynucleotides (A, G, C, inosine or T), ribonebularine, 2'-O-methylnebularine or deoxynebularine
  modified_base 103: mod_base = OTHER; note = uniform ribonucleotides (A, C, G, inosine or U), deoxynucleotides (A, G, C, inosine or T), ribonebularine, 2'-O-methylnebularine or deoxynebularine
  modified_base 1..4: mod_base = OTHER; note = phosphorothioate linkage
  modified_base 97..100: mod_base = OTHER; note = phosphorothioate linkage
  misc_feature 1..100: note = RNA
  misc_feature 101..103: note = Optionally DNA or RNA

SEQ ID NO: 2807 - DNA, 103 bp, synthetic construct; identical to SEQ ID NO: 1797
  source 1..103: mol_type = other DNA
  modified_base 1: mod_base = OTHER; note = 2'-O-methyl ribonucleotide
  modified_base 2: mod_base = OTHER; note = 2'-O-methyl ribonucleotide
  modified_base 3: mod_base = OTHER; note = 2'-O-methyl ribonucleotide
  modified_base 29: mod_base = OTHER; note = 2'-O-methyl ribonucleotide
  modified_base 30: mod_base = OTHER; note = 2'-O-methyl ribonucleotide
  modified_base 31: mod_base = OTHER; note = 2'-O-methyl ribonucleotide
  modified_base 32: mod_base = OTHER; note = 2'-O-methyl ribonucleotide
  modified_base 33: mod_base = OTHER; note = 2'-O-methyl ribonucleotide
  modified_base 34: mod_base = OTHER; note = 2'-O-methyl ribonucleotide
  modified_base 35: mod_base = OTHER; note = 2'-O-methyl ribonucleotide
  modified_base 36: mod_base = OTHER; note = 2'-O-methyl ribonucleotide
  modified_base 37: mod_base = OTHER; note = 2'-O-methyl ribonucleotide
  modified_base 38: mod_base = OTHER; note = 2'-O-methyl ribonucleotide
  modified_base 39: mod_base = OTHER; note = 2'-O-methyl ribonucleotide
  modified_base 40: mod_base = OTHER; note = 2'-O-methyl ribonucleotide
  modified_base 69: mod_base = OTHER; note = 2'-O-methyl ribonucleotide
  modified_base 70: mod_base = OTHER; note = 2'-O-methyl ribonucleotide
  modified_base 71: mod_base = OTHER; note = 2'-O-methyl ribonucleotide
  modified_base 72: mod_base = OTHER; note = 2'-O-methyl ribonucleotide
  modified_base 73: mod_base = OTHER; note = 2'-O-methyl ribonucleotide
  modified_base 74: mod_base = OTHER; note = 2'-O-methyl ribonucleotide
  modified_base 75: mod_base = OTHER; note = 2'-O-methyl ribonucleotide
  modified_base 76: mod_base = OTHER; note = 2'-O-methyl ribonucleotide
  modified_base 77: mod_base = OTHER; note = 2'-O-methyl ribonucleotide
  modified_base 78: mod_base = OTHER; note = 2'-O-methyl ribonucleotide
  modified_base 79: mod_base = OTHER; note = 2'-O-methyl ribonucleotide
  modified_base 80: mod_base = OTHER; note = 2'-O-methyl ribonucleotide
  modified_base 81: mod_base = OTHER; note = 2'-O-methyl ribonucleotide
  modified_base 82: mod_base = OTHER; note = 2'-O-methyl ribonucleotide
  modified_base 83: mod_base = OTHER; note = 2'-O-methyl ribonucleotide
  modified_base 84: mod_base = OTHER; note = 2'-O-methyl ribonucleotide
  modified_base 85: mod_base = OTHER; note = 2'-O-methyl ribonucleotide
  modified_base 86: mod_base = OTHER; note = 2'-O-methyl ribonucleotide
  modified_base 87: mod_base = OTHER; note = 2'-O-methyl ribonucleotide
  modified_base 88: mod_base = OTHER; note = 2'-O-methyl ribonucleotide
  modified_base 89: mod_base = OTHER; note = 2'-O-methyl ribonucleotide
  modified_base 90: mod_base = OTHER; note = 2'-O-methyl ribonucleotide
  modified_base 91: mod_base = OTHER; note = 2'-O-methyl ribonucleotide
  modified_base 92: mod_base = OTHER; note = 2'-O-methyl ribonucleotide
  modified_base 93: mod_base = OTHER; note = 2'-O-methyl ribonucleotide
  modified_base 94: mod_base = OTHER; note = 2'-O-methyl ribonucleotide
  modified_base 95: mod_base = OTHER; note = 2'-O-methyl ribonucleotide
  modified_base 96: mod_base = OTHER; note = 2'-O-methyl ribonucleotide
  modified_base 97: mod_base = OTHER; note = 2'-O-methyl ribonucleotide
  modified_base 98: mod_base = OTHER; note = 2'-O-methyl ribonucleotide
  modified_base 99: mod_base = OTHER; note = 2'-O-methyl ribonucleotide
  modified_base 100: mod_base = OTHER; note = 2'-O-methyl ribonucleotide
  modified_base 101: mod_base = OTHER; note = uniform ribonucleotides (A, C, G, inosine or U), deoxynucleotides (A, G, C, inosine or T), ribonebularine, 2'-O-methylnebularine or deoxynebularine
  modified_base 102: mod_base = OTHER; note = uniform ribonucleotides (A, C, G, inosine or U), deoxynucleotides (A, G, C, inosine or T), ribonebularine, 2'-O-methylnebularine or deoxynebularine
  modified_base 103: mod_base = OTHER; note = uniform ribonucleotides (A, C, G, inosine or U), deoxynucleotides (A, G, C, inosine or T), ribonebularine, 2'-O-methylnebularine or deoxynebularine
  modified_base 1..4: mod_base = OTHER; note = phosphorothioate linkage
  modified_base 97..100: mod_base = OTHER; note = phosphorothioate linkage
  misc_feature 1..100: note = RNA
  misc_feature 101..103: note = Optionally DNA or RNA

SEQ ID NO: 2808 - DNA, 103 bp, synthetic construct; identical to SEQ ID NO: 1797
  source 1..103: mol_type = other DNA
  modified_base 1: mod_base = OTHER; note = 2'-O-methyl ribonucleotide
  modified_base 2: mod_base = OTHER; note = 2'-O-methyl ribonucleotide
  modified_base 3: mod_base = OTHER; note = 2'-O-methyl ribonucleotide
  modified_base 21: mod_base = OTHER; note = 2'-O-methyl ribonucleotide
  modified_base 28: mod_base = OTHER; note = 2'-O-methyl ribonucleotide
  modified_base 29: mod_base = OTHER; note = 2'-O-methyl ribonucleotide
  modified_base 30: mod_base = OTHER; note = 2'-O-methyl ribonucleotide
  modified_base 31: mod_base = OTHER; note = 2'-O-methyl ribonucleotide
  modified_base 32: mod_base = OTHER; note = 2'-O-methyl ribonucleotide
  modified_base 34: mod_base = OTHER; note = 2'-O-methyl ribonucleotide
  modified_base 35: mod_base = OTHER; note = 2'-O-methyl ribonucleotide
  modified_base 36: mod_base = OTHER; note = 2'-O-methyl ribonucleotide
  modified_base 37: mod_base = OTHER; note = 2'-O-methyl ribonucleotide
  modified_base 38: mod_base = OTHER; note = 2'-O-methyl ribonucleotide
  modified_base 39: mod_base = OTHER; note = 2'-O-methyl ribonucleotide
  modified_base 40: mod_base = OTHER; note = 2'-O-methyl ribonucleotide
  modified_base 41: mod_base = OTHER; note = 2'-O-methyl ribonucleotide
  modified_base 42: mod_base = OTHER; note = 2'-O-methyl ribonucleotide
  modified_base 46: mod_base = OTHER; note = 2'-O-methyl ribonucleotide
  modified_base 48: mod_base = OTHER; note = 2'-O-methyl ribonucleotide
  modified_base 50: mod_base = OTHER; note = 2'-O-methyl ribonucleotide
  modified_base 52: mod_base = OTHER; note = 2'-O-methyl ribonucleotide
  modified_base 53: mod_base = OTHER; note = 2'-O-methyl ribonucleotide
  modified_base 54: mod_base = OTHER; note = 2'-O-methyl ribonucleotide
  modified_base 57: mod_base = OTHER; note = 2'-O-methyl ribonucleotide
  modified_base 61: mod_base = OTHER; note = 2'-O-methyl ribonucleotide
  modified_base 66: mod_base = OTHER; note = 2'-O-methyl ribonucleotide
  modified_base 67: mod_base = OTHER; note = 2'-O-methyl ribonucleotide
  modified_base 70: mod_base = OTHER; note = 2'-O-methyl ribonucleotide
  modified_base 71: mod_base = OTHER; note = 2'-O-methyl ribonucleotide
  modified_base 72: mod_base = OTHER; note = 2'-O-methyl ribonucleotide
  modified_base 74: mod_base = OTHER; note = 2'-O-methyl ribonucleotide
  modified_base 75: mod_base = OTHER; note = 2'-O-methyl ribonucleotide
  modified_base 76: mod_base = OTHER; note = 2'-O-methyl ribonucleotide
  modified_base 77: mod_base = OTHER; note = 2'-O-methyl ribonucleotide
  modified_base 78: mod_base = OTHER; note = 2'-O-methyl ribonucleotide
  modified_base 79: mod_base = OTHER; note = 2'-O-methyl ribonucleotide
  modified_base 80: mod_base = OTHER; note = 2'-O-methyl ribonucleotide
  modified_base 82: mod_base = OTHER; note = 2'-O-methyl ribonucleotide
  modified_base 83: mod_base = OTHER; note = 2'-O-methyl ribonucleotide
  modified_base 84: mod_base = OTHER; note = 2'-O-methyl ribonucleotide
  modified_base 85: mod_base = OTHER; note = 2'-O-methyl ribonucleotide
  modified_base 86: mod_base = OTHER; note = 2'-O-methyl ribonucleotide
  modified_base 87: mod_base = OTHER; note = 2'-O-methyl ribonucleotide
  modified_base 89: mod_base = OTHER; note = 2'-O-methyl ribonucleotide
  modified_base 92: mod_base = OTHER; note = 2'-O-methyl ribonucleotide
  modified_base 93: mod_base = OTHER; note = 2'-O-methyl ribonucleotide
  modified_base 94: mod_base = OTHER; note = 2'-O-methyl ribonucleotide
  modified_base 95: mod_base = OTHER; note = 2'-O-methyl ribonucleotide
  modified_base 96: mod_base = OTHER; note = 2'-O-methyl ribonucleotide
  modified_base 97: mod_base = OTHER; note = 2'-O-methyl ribonucleotide
  modified_base 98: mod_base = OTHER; note = 2'-O-methyl ribonucleotide
  modified_base 99: mod_base = OTHER; note = 2'-O-methyl ribonucleotide
  modified_base 100: mod_base = OTHER; note = 2'-O-methyl ribonucleotide
  modified_base 101: mod_base = OTHER; note = uniform ribonucleotides (A, C, G, inosine or U), deoxynucleotides (A, G, C, inosine or T), ribonebularine, 2'-O-methylnebularine or deoxynebularine
  modified_base 102: mod_base = OTHER; note = uniform ribonucleotides (A, C, G, inosine or U), deoxynucleotides (A, G, C, inosine or T), ribonebularine, 2'-O-methylnebularine or deoxynebularine
  modified_base 103: mod_base = OTHER; note = uniform ribonucleotides (A, C, G, inosine or U), deoxynucleotides (A, G, C, inosine or T), ribonebularine, 2'-O-methylnebularine or deoxynebularine
  modified_base 1..4: mod_base = OTHER; note = phosphorothioate linkage
  modified_base 97..100: mod_base = OTHER; note = phosphorothioate linkage
  misc_feature 1..100: note = RNA
  misc_feature 101..103: note = Optionally DNA or RNA

SEQ ID NO: 2809 - DNA, 103 bp, synthetic construct; identical to SEQ ID NO: 1797
  source 1..103: mol_type = other DNA
  modified_base 1: mod_base = OTHER; note = 2'-O-methyl ribonucleotide
  modified_base 2: mod_base = OTHER; note = 2'-O-methyl ribonucleotide
  modified_base 3: mod_base = OTHER; note = 2'-O-methyl ribonucleotide
  modified_base 21: mod_base = OTHER; note = 2'-O-methyl ribonucleotide
  modified_base 28: mod_base = OTHER; note = 2'-O-methyl ribonucleotide
  modified_base 29: mod_base = OTHER; note = 2'-O-methyl ribonucleotide
  modified_base 30: mod_base = OTHER; note = 2'-O-methyl ribonucleotide
  modified_base 31: mod_base = OTHER; note = 2'-O-methyl ribonucleotide
  modified_base 32: mod_base = OTHER; note = 2'-O-methyl ribonucleotide
  modified_base 33: mod_base = OTHER; note = 2'-O-methyl ribonucleotide
  modified_base 34: mod_base = OTHER; note = 2'-O-methyl ribonucleotide
  modified_base 35: mod_base = OTHER; note = 2'-O-methyl ribonucleotide
  modified_base 36: mod_base = OTHER; note = 2'-O-methyl ribonucleotide
  modified_base 37: mod_base = OTHER; note = 2'-O-methyl ribonucleotide
  modified_base 38: mod_base = OTHER; note = 2'-O-methyl ribonucleotide
  modified_base 39: mod_base = OTHER; note = 2'-O-methyl ribonucleotide
  modified_base 40: mod_base = OTHER; note = 2'-O-methyl ribonucleotide
  modified_base 41: mod_base = OTHER; note = 2'-O-methyl ribonucleotide
  modified_base 42: mod_base = OTHER; note = 2'-O-methyl ribonucleotide
  modified_base 46: mod_base = OTHER; note = 2'-O-methyl ribonucleotide
  modified_base 48: mod_base = OTHER; note = 2'-O-methyl ribonucleotide
  modified_base 50: mod_base = OTHER; note = 2'-O-methyl ribonucleotide
  modified_base 52: mod_base = OTHER; note = 2'-O-methyl ribonucleotide
  modified_base 53: mod_base = OTHER; note = 2'-O-methyl ribonucleotide
  modified_base 54: mod_base = OTHER; note = 2'-O-methyl ribonucleotide
  modified_base 55: mod_base = OTHER; note = 2'-O-methyl ribonucleotide
  modified_base 56: mod_base = OTHER; note = 2'-O-methyl ribonucleotide
  modified_base 57: mod_base = OTHER; note = 2'-O-methyl ribonucleotide
  modified_base 60: mod_base = OTHER; note = 2'-O-methyl ribonucleotide
  modified_base 61: mod_base = OTHER; note = 2'-O-methyl ribonucleotide
  modified_base 66: mod_base = OTHER; note = 2'-O-methyl ribonucleotide
  modified_base 67: mod_base = OTHER; note = 2'-O-methyl ribonucleotide
  modified_base 70: mod_base = OTHER; note = 2'-O-methyl ribonucleotide
  modified_base 71: mod_base = OTHER; note = 2'-O-methyl ribonucleotide
  modified_base 72: mod_base = OTHER; note = 2'-O-methyl ribonucleotide
  modified_base 73: mod_base = OTHER; note = 2'-O-methyl ribonucleotide
  modified_base 74: mod_base = OTHER; note = 2'-O-methyl ribonucleotide
  modified_base 75: mod_base = OTHER; note = 2'-O-methyl ribonucleotide
  modified_base 76: mod_base = OTHER; note = 2'-O-methyl ribonucleotide
  modified_base 77: mod_base = OTHER; note = 2'-O-methyl ribonucleotide
  modified_base 78: mod_base = OTHER; note = 2'-O-methyl ribonucleotide
  modified_base 79: mod_base = OTHER; note = 2'-O-methyl ribonucleotide
  modified_base 80: mod_base = OTHER; note = 2'-O-methyl ribonucleotide
  modified_base 81: mod_base = OTHER; note = 2'-O-methyl ribonucleotide
  modified_base 83: mod_base = OTHER; note = 2'-O-methyl ribonucleotide
  modified_base 84: mod_base = OTHER; note = 2'-O-methyl ribonucleotide
  modified_base 85: mod_base = OTHER; note = 2'-O-methyl ribonucleotide
  modified_base 86: mod_base = OTHER; note = 2'-O-methyl ribonucleotide
  modified_base 87: mod_base = OTHER; note = 2'-O-methyl ribonucleotide
  modified_base 88: mod_base = OTHER; note = 2'-O-methyl ribonucleotide
  modified_base 89: mod_base = OTHER; note = 2'-O-methyl ribonucleotide
  modified_base 90: mod_base = OTHER; note = 2'-O-methyl ribonucleotide
  modified_base 91: mod_base = OTHER; note = 2'-O-methyl ribonucleotide
  modified_base 92: mod_base = OTHER; note = 2'-O-methyl ribonucleotide
  modified_base 93: mod_base = OTHER; note = 2'-O-methyl ribonucleotide
  modified_base 94: mod_base = OTHER; note = 2'-O-methyl ribonucleotide
  modified_base 95: mod_base = OTHER; note = 2'-O-methyl ribonucleotide
  modified_base 96: mod_base = OTHER; note = 2'-O-methyl ribonucleotide
  modified_base 97: mod_base = OTHER; note = 2'-O-methyl ribonucleotide
  modified_base 98: mod_base = OTHER; note = 2'-O-methyl ribonucleotide
  modified_base 99: mod_base = OTHER; note = 2'-O-methyl ribonucleotide
  modified_base 100: mod_base = OTHER; note = 2'-O-methyl ribonucleotide
  modified_base 101: mod_base = OTHER; note = uniform ribonucleotides (A, C, G, inosine or U), deoxynucleotides (A, G, C, inosine or T), ribonebularine, 2'-O-methylnebularine or deoxynebularine
  modified_base 102: mod_base = OTHER; note = uniform ribonucleotides (A, C, G, inosine or U), deoxynucleotides (A, G, C, inosine or T), ribonebularine, 2'-O-methylnebularine or deoxynebularine
  modified_base 103: mod_base = OTHER; note = uniform ribonucleotides (A, C, G, inosine or U), deoxynucleotides (A, G, C, inosine or T), ribonebularine, 2'-O-methylnebularine or deoxynebularine
  modified_base 1..4: mod_base = OTHER; note = phosphorothioate linkage
  modified_base 97..100: mod_base = OTHER; note = phosphorothioate linkage
  misc_feature 1..100: note = RNA
  misc_feature 101..103: note = Optionally DNA or RNA

SEQ ID NO: 2810 - DNA, 103 bp, synthetic construct; identical to SEQ ID NO: 1795
  source 1..103: mol_type = other DNA
  modified_base 1: mod_base = OTHER; note = 2'-O-methyl ribonucleotide
  modified_base 2: mod_base = OTHER; note = 2'-O-methyl ribonucleotide
  modified_base 3: mod_base = OTHER; note = 2'-O-methyl ribonucleotide
  modified_base 21: mod_base = OTHER; note = 2'-O-methyl ribonucleotide
  modified_base 28: mod_base = OTHER; note = 2'-O-methyl ribonucleotide
  modified_base 29: mod_base = OTHER; note = 2'-O-methyl ribonucleotide
  modified_base 30: mod_base = OTHER; note = 2'-O-methyl ribonucleotide
  modified_base 31: mod_base = OTHER; note = 2'-O-methyl ribonucleotide
  modified_base 32: mod_base = OTHER; note = 2'-O-methyl ribonucleotide
  modified_base 33: mod_base = OTHER; note = 2'-O-methyl ribonucleotide
  modified_base 34: mod_base = OTHER; note = 2'-O-methyl ribonucleotide
  modified_base 35: mod_base = OTHER; note = 2'-O-methyl ribonucleotide
  modified_base 36: mod_base = OTHER; note = 2'-O-methyl ribonucleotide
  modified_base 37: mod_base = OTHER; note = 2'-O-methyl ribonucleotide
  modified_base 38: mod_base = OTHER; note = 2'-O-methyl ribonucleotide
  modified_base 39: mod_base = OTHER; note = 2'-O-methyl ribonucleotide
  modified_base 40: mod_base = OTHER; note = 2'-O-methyl ribonucleotide
  modified_base 41: mod_base = OTHER; note = 2'-O-methyl ribonucleotide
  modified_base 42: mod_base = OTHER; note = 2'-O-methyl ribonucleotide
  modified_base 46: mod_base = OTHER; note = 2'-O-methyl ribonucleotide
  modified_base 48: mod_base = OTHER; note = 2'-O-methyl ribonucleotide
  modified_base 50: mod_base = OTHER; note = 2'-O-methyl ribonucleotide
  modified_base 52: mod_base = OTHER; note = 2'-O-methyl ribonucleotide
  modified_base 53: mod_base = OTHER; note = 2'-O-methyl ribonucleotide
  modified_base 54: mod_base = OTHER; note = 2'-O-methyl ribonucleotide
  modified_base 55: mod_base = OTHER; note = 2'-O-methyl ribonucleotide
  modified_base 56: mod_base = OTHER; note = 2'-O-methyl ribonucleotide
  modified_base 57: mod_base = OTHER; note = 2'-O-methyl ribonucleotide
  modified_base 60: mod_base = OTHER; note = 2'-O-methyl ribonucleotide
  modified_base 61: mod_base = OTHER; note = 2'-O-methyl ribonucleotide
  modified_base 66: mod_base = OTHER; note = 2'-O-methyl ribonucleotide
  modified_base 67: mod_base = OTHER; note = 2'-O-methyl ribonucleotide
  modified_base 70: mod_base = OTHER; note = 2'-O-methyl ribonucleotide
  modified_base 71: mod_base = OTHER; note = 2'-O-methyl ribonucleotide
  modified_base 72: mod_base = OTHER; note = 2'-O-methyl ribonucleotide
  modified_base 73: mod_base = OTHER; note = 2'-O-methyl ribonucleotide
  modified_base 74: mod_base = OTHER; note = 2'-O-methyl ribonucleotide
  modified_base 75: mod_base = OTHER; note = 2'-O-methyl ribonucleotide
  modified_base 76: mod_base = OTHER; note = 2'-O-methyl ribonucleotide
  modified_base 77: mod_base = OTHER; note = 2'-O-methyl ribonucleotide
  modified_base 78: mod_base = OTHER; note = 2'-O-methyl ribonucleotide
  modified_base 79: mod_base = OTHER; note = 2'-O-methyl ribonucleotide
  modified_base 80: mod_base = OTHER; note = 2'-O-methyl ribonucleotide
  modified_base 81: mod_base = OTHER; note = 2'-O-methyl ribonucleotide
  modified_base 83: mod_base = OTHER; note = 2'-O-methyl ribonucleotide
  modified_base 84: mod_base = OTHER; note = 2'-O-methyl ribonucleotide
  modified_base 85: mod_base = OTHER; note = 2'-O-methyl ribonucleotide
  modified_base 86: mod_base = OTHER; note = 2'-O-methyl ribonucleotide
  modified_base 87: mod_base = OTHER; note = 2'-O-methyl ribonucleotide
  modified_base 88: mod_base = OTHER; note = 2'-O-methyl ribonucleotide
  modified_base 89: mod_base = OTHER; note = 2'-O-methyl ribonucleotide
  modified_base 90: mod_base = OTHER; note = 2'-O-methyl ribonucleotide
  modified_base 91: mod_base = OTHER; note = 2'-O-methyl ribonucleotide
  modified_base 92: mod_base = OTHER; note = 2'-O-methyl ribonucleotide
  modified_base 93: mod_base = OTHER; note = 2'-O-methyl ribonucleotide
  modified_base 94: mod_base = OTHER; note = 2'-O-methyl ribonucleotide
  modified_base 95: mod_base = OTHER; note = 2'-O-methyl ribonucleotide
  modified_base 96: mod_base = OTHER; note = 2'-O-methyl ribonucleotide
  modified_base 97: mod_base = OTHER; note = 2'-O-methyl ribonucleotide
  modified_base 98: mod_base = OTHER; note = 2'-O-methyl ribonucleotide
  modified_base 99: mod_base = OTHER; note = 2'-O-methyl ribonucleotide
  modified_base 100: mod_base = OTHER; note = 2'-O-methyl ribonucleotide
  modified_base 101: mod_base = OTHER; note = uniform ribonucleotides (A, C, G, inosine or U), deoxynucleotides (A, G, C, inosine or T), ribonebularine, 2'-O-methylnebularine or deoxynebularine
  modified_base 102: mod_base = OTHER; note = uniform ribonucleotides (A, C, G, inosine or U), deoxynucleotides (A, G, C, inosine or T), ribonebularine, 2'-O-methylnebularine or deoxynebularine
  modified_base 103: mod_base = OTHER; note = uniform ribonucleotides (A, C, G, inosine or U), deoxynucleotides (A, G, C, inosine or T), ribonebularine, 2'-O-methylnebularine or deoxynebularine
  modified_base 1..4: mod_base = OTHER; note = phosphorothioate linkage
  modified_base 64..65: mod_base = OTHER; note = phosphorothioate linkage
  modified_base 97..100: mod_base = OTHER; note = phosphorothioate linkage
  misc_feature 1..100: note = RNA
  misc_feature 101..103: note = Optionally DNA or RNA

SEQ ID NO: 2811 - DNA, 103 bp, synthetic construct; identical to SEQ ID NO: 1795
  source 1..103: mol_type = other DNA
  modified_base 1: mod_base = OTHER; note = 2'-O-methyl ribonucleotide
  modified_base 2: mod_base = OTHER; note = 2'-O-methyl ribonucleotide
  modified_base 3: mod_base = OTHER; note = 2'-O-methyl ribonucleotide
  modified_base 21: mod_base = OTHER; note = 2'-O-methyl ribonucleotide
  modified_base 28: mod_base = OTHER; note = 2'-O-methyl ribonucleotide
  modified_base 29: mod_base = OTHER; note = 2'-O-methyl ribonucleotide
  modified_base 30: mod_base = OTHER; note = 2'-O-methyl ribonucleotide
  modified_base 31: mod_base = OTHER; note = 2'-O-methyl ribonucleotide
  modified_base 32: mod_base = OTHER; note = 2'-O-methyl ribonucleotide
  modified_base 34: mod_base = OTHER; note = 2'-O-methyl ribonucleotide
  modified_base 35: mod_base = OTHER; note = 2'-O-methyl ribonucleotide
  modified_base 36: mod_base = OTHER; note = 2'-O-methyl ribonucleotide
  modified_base 37: mod_base = OTHER; note = 2'-O-methyl ribonucleotide
  modified_base 38: mod_base = OTHER; note = 2'-O-methyl ribonucleotide
  modified_base 39: mod_base = OTHER; note = 2'-O-methyl ribonucleotide
  modified_base 40: mod_base = OTHER; note = 2'-O-methyl ribonucleotide
  modified_base 41: mod_base = OTHER; note = 2'-O-methyl ribonucleotide
  modified_base 42: mod_base = OTHER; note = 2'-O-methyl ribonucleotide
  modified_base 46: mod_base = OTHER; note = 2'-O-methyl ribonucleotide
  modified_base 48: mod_base = OTHER; note = 2'-O-methyl ribonucleotide
  modified_base 50: mod_base = OTHER; note = 2'-O-methyl ribonucleotide
  modified_base 52: mod_base = OTHER; note = 2'-O-methyl ribonucleotide
  modified_base 53: mod_base = OTHER; note = 2'-O-methyl ribonucleotide
  modified_base 54: mod_base = OTHER; note = 2'-O-methyl ribonucleotide
  modified_base 55: mod_base = OTHER; note = 2'-O-methyl ribonucleotide
  modified_base 56: mod_base = OTHER; note = 2'-O-methyl ribonucleotide
  modified_base 57: mod_base = OTHER; note = 2'-O-methyl ribonucleotide
  modified_base 60: mod_base = OTHER; note = 2'-O-methyl ribonucleotide
  modified_base 61: mod_base = OTHER; note = 2'-O-methyl ribonucleotide
  modified_base 66: mod_base = OTHER; note = 2'-O-methyl ribonucleotide
  modified_base 67: mod_base = OTHER; note = 2'-O-methyl ribonucleotide
  modified_base 70: mod_base = OTHER; note = 2'-O-methyl ribonucleotide
  modified_base 71: mod_base = OTHER; note = 2'-O-methyl ribonucleotide
  modified_base 72: mod_base = OTHER; note = 2'-O-methyl ribonucleotide
  modified_base 74: mod_base = OTHER; note = 2'-O-methyl ribonucleotide
  modified_base 75: mod_base = OTHER; note = 2'-O-methyl ribonucleotide
  modified_base 76: mod_base = OTHER; note = 2'-O-methyl ribonucleotide
  modified_base 77: mod_base = OTHER; note = 2'-O-methyl ribonucleotide
  modified_base 78: mod_base = OTHER; note = 2'-O-methyl ribonucleotide
  modified_base 79: mod_base = OTHER; note = 2'-O-methyl ribonucleotide
  modified_base 80: mod_base = OTHER; note = 2'-O-methyl ribonucleotide
  modified_base 81: mod_base = OTHER; note = 2'-O-methyl ribonucleotide
  modified_base 83: mod_base = OTHER; note = 2'-O-methyl ribonucleotide
  modified_base 84: mod_base = OTHER; note = 2'-O-methyl ribonucleotide
  modified_base 85: mod_base = OTHER; note = 2'-O-methyl ribonucleotide
  modified_base 86: mod_base = OTHER; note = 2'-O-methyl ribonucleotide
  modified_base 87: mod_base = OTHER; note = 2'-O-methyl ribonucleotide
  modified_base 88: mod_base = OTHER; note = 2'-O-methyl ribonucleotide
  modified_base 89: mod_base = OTHER; note = 2'-O-methyl ribonucleotide
  modified_base 90: mod_base = OTHER; note = 2'-O-methyl ribonucleotide
  modified_base 91: mod_base = OTHER; note = 2'-O-methyl ribonucleotide
  modified_base 92: mod_base = OTHER; note = 2'-O-methyl ribonucleotide
  modified_base 93: mod_base = OTHER; note = 2'-O-methyl ribonucleotide
  modified_base 94: mod_base = OTHER; note = 2'-O-methyl ribonucleotide
  modified_base 95: mod_base = OTHER; note = 2'-O-methyl ribonucleotide
  modified_base 96: mod_base = OTHER; note = 2'-O-methyl ribonucleotide
  modified_base 97: mod_base = OTHER; note = 2'-O-methyl ribonucleotide
  modified_base 98: mod_base = OTHER; note = 2'-O-methyl ribonucleotide
  modified_base 99: mod_base = OTHER; note = 2'-O-methyl ribonucleotide
  modified_base 100: mod_base = OTHER; note = 2'-O-methyl ribonucleotide
  modified_base 101: mod_base = OTHER; note = uniform ribonucleotides (A, C, G, inosine or U), deoxynucleotides (A, G, C, inosine or T), ribonebularine, 2'-O-methylnebularine or deoxynebularine
  modified_base 102: mod_base = OTHER; note = uniform ribonucleotides (A, C, G, inosine or U), deoxynucleotides (A, G, C, inosine or T), ribonebularine, 2'-O-methylnebularine or deoxynebularine
  modified_base 103: mod_base = OTHER; note = uniform ribonucleotides (A, C, G, inosine or U), deoxynucleotides (A, G, C, inosine or T), ribonebularine, 2'-O-methylnebularine or deoxynebularine
  modified_base 1..4: mod_base = OTHER; note = phosphorothioate linkage
  modified_base 64..65: mod_base = OTHER; note = phosphorothioate linkage
  modified_base 97..100: mod_base = OTHER; note = phosphorothioate linkage
  misc_feature 1..100: note = RNA
  misc_feature 101..103: note = Optionally DNA or RNA

SEQ ID NO: 2812 - DNA, 103 bp, synthetic construct; identical to SEQ ID NO: 1796
  source 1..103: mol_type = other DNA
  modified_base 1: mod_base = OTHER; note = 2'-O-methyl ribonucleotide
  modified_base 2: mod_base = OTHER; note = 2'-O-methyl ribonucleotide
  modified_base 3: mod_base = OTHER; note = 2'-O-methyl ribonucleotide
  modified_base 21: mod_base = OTHER; note = 2'-O-methyl ribonucleotide
  modified_base 28: mod_base = OTHER; note = 2'-O-methyl ribonucleotide
  modified_base 29: mod_base = OTHER; note = 2'-O-methyl ribonucleotide
  modified_base 30: mod_base = OTHER; note = 2'-O-methyl ribonucleotide
  modified_base 31: mod_base = OTHER; note = 2'-O-methyl ribonucleotide
  modified_base 32: mod_base = OTHER; note = 2'-O-methyl ribonucleotide
  modified_base 33: mod_base = OTHER; note = 2'-O-methyl ribonucleotide
  modified_base 34: mod_base = OTHER; note = 2'-O-methyl ribonucleotide
  modified_base 35: mod_base = OTHER; note = 2'-O-methyl ribonucleotide
  modified_base 36: mod_base = OTHER; note = 2'-O-methyl ribonucleotide
  modified_base 37: mod_base = OTHER; note = 2'-O-methyl ribonucleotide
  modified_base 38: mod_base = OTHER; note = 2'-O-methyl ribonucleotide
  modified_base 39: mod_base = OTHER; note = 2'-O-methyl ribonucleotide
  modified_base 40: mod_base = OTHER; note = 2'-O-methyl ribonucleotide
  modified_base 41: mod_base = OTHER; note = 2'-O-methyl ribonucleotide
  modified_base 42: mod_base = OTHER; note = 2'-O-methyl ribonucleotide
  modified_base 46: mod_base = OTHER; note = 2'-O-methyl ribonucleotide
  modified_base 48: mod_base = OTHER; note = 2'-O-methyl ribonucleotide
  modified_base 50: mod_base = OTHER; note = 2'-O-methyl ribonucleotide
  modified_base 52: mod_base = OTHER; note = 2'-O-methyl ribonucleotide
  modified_base 53: mod_base = OTHER; note = 2'-O-methyl ribonucleotide
  modified_base 54: mod_base = OTHER; note = 2'-O-methyl ribonucleotide
  modified_base 55: mod_base = OTHER; note = 2'-O-methyl ribonucleotide
  modified_base 56: mod_base = OTHER; note = 2'-O-methyl ribonucleotide
  modified_base 57: mod_base = OTHER; note = 2'-O-methyl ribonucleotide
  modified_base 60: mod_base = OTHER; note = 2'-O-methyl ribonucleotide
  modified_base 61: mod_base = OTHER; note = 2'-O-methyl ribonucleotide
  modified_base 66: mod_base = OTHER; note = 2'-O-methyl ribonucleotide
  modified_base 67: mod_base = OTHER; note = 2'-O-methyl ribonucleotide
  modified_base 70: mod_base = OTHER; note = 2'-O-methyl ribonucleotide
  modified_base 71: mod_base = OTHER; note = 2'-O-methyl ribonucleotide
  modified_base 72: mod_base = OTHER; note = 2'-O-methyl ribonucleotide
  modified_base 73: mod_base = OTHER; note = 2'-O-methyl ribonucleotide
  modified_base 74: mod_base = OTHER; note = 2'-O-methyl ribonucleotide
  modified_base 75: mod_base = OTHER; note = 2'-O-methyl ribonucleotide
  modified_base 76: mod_base = OTHER; note = 2'-O-methyl ribonucleotide
  modified_base 77: mod_base = OTHER; note = 2'-O-methyl ribonucleotide
  modified_base 78: mod_base = OTHER; note = 2'-O-methyl ribonucleotide
  modified_base 79: mod_base = OTHER; note = 2'-O-methyl ribonucleotide
  modified_base 80: mod_base = OTHER; note = 2'-O-methyl ribonucleotide
  modified_base 81: mod_base = OTHER; note = 2'-O-methyl ribonucleotide
  modified_base 83: mod_base = OTHER; note = 2'-O-methyl ribonucleotide
  modified_base 84: mod_base = OTHER; note = 2'-O-methyl ribonucleotide
  modified_base 85: mod_base = OTHER; note = 2'-O-methyl ribonucleotide
  modified_base 86: mod_base = OTHER; note = 2'-O-methyl ribonucleotide
  modified_base 87: mod_base = OTHER; note = 2'-O-methyl ribonucleotide
  modified_base 88: mod_base = OTHER; note = 2'-O-methyl ribonucleotide
  modified_base 89: mod_base = OTHER; note = 2'-O-methyl ribonucleotide
  modified_base 90: mod_base = OTHER; note = 2'-O-methyl ribonucleotide
  modified_base 91: mod_base = OTHER; note = 2'-O-methyl ribonucleotide
  modified_base 92: mod_base = OTHER; note = 2'-O-methyl ribonucleotide
  modified_base 93: mod_base = OTHER; note = 2'-O-methyl ribonucleotide
  modified_base 94: mod_base = OTHER; note = 2'-O-methyl ribonucleotide
  modified_base 95: mod_base = OTHER; note = 2'-O-methyl ribonucleotide
  modified_base 96: mod_base = OTHER; note = 2'-O-methyl ribonucleotide
  modified_base 97: mod_base = OTHER; note = 2'-O-methyl ribonucleotide
  modified_base 98: mod_base = OTHER; note = 2'-O-methyl ribonucleotide
  modified_base 99: mod_base = OTHER; note = 2'-O-methyl ribonucleotide
  modified_base 100: mod_base = OTHER; note = 2'-O-methyl ribonucleotide
  modified_base 101: mod_base = OTHER; note = uniform ribonucleotides (A, C, G, inosine or U), deoxynucleotides (A, G, C, inosine or T), ribonebularine, 2'-O-methylnebularine or deoxynebularine
  modified_base 102: mod_base = OTHER; note = uniform ribonucleotides (A, C, G, inosine or U), deoxynucleotides (A, G, C, inosine or T), ribonebularine, 2'-O-methylnebularine or deoxynebularine
  modified_base 103: mod_base = OTHER; note = uniform ribonucleotides (A, C, G, inosine or U), deoxynucleotides (A, G, C, inosine or T), ribonebularine, 2'-O-methylnebularine or deoxynebularine
  modified_base 1..4: mod_base = OTHER; note = phosphorothioate linkage
  modified_base 64..65: mod_base = OTHER; note = phosphorothioate linkage
  modified_base 97..100: mod_base = OTHER; note = phosphorothioate linkage
  misc_feature 1..100: note = RNA
  misc_feature 101..103: note = Optionally DNA or RNA

SEQ ID NO: 2813 - DNA, 103 bp, synthetic construct; identical to SEQ ID NO: 1796
  source 1..103: mol_type = other DNA
  modified_base 1: mod_base = OTHER; note = 2'-O-methyl ribonucleotide
  modified_base 2: mod_base = OTHER; note = 2'-O-methyl ribonucleotide
  modified_base 3: mod_base = OTHER; note = 2'-O-methyl ribonucleotide
  modified_base 21: mod_base = OTHER; note = 2'-O-methyl ribonucleotide
  modified_base 28: mod_base = OTHER; note = 2'-O-methyl ribonucleotide
  modified_base 29: mod_base = OTHER; note = 2'-O-methyl ribonucleotide
  modified_base 30: mod_base = OTHER; note = 2'-O-methyl ribonucleotide
  modified_base 31: mod_base = OTHER; note = 2'-O-methyl ribonucleotide
  modified_base 32: mod_base = OTHER; note = 2'-O-methyl ribonucleotide
  modified_base 34: mod_base = OTHER; note = 2'-O-methyl ribonucleotide
  modified_base 35: mod_base = OTHER; note = 2'-O-methyl ribonucleotide
  modified_base 36: mod_base = OTHER; note = 2'-O-methyl ribonucleotide
  modified_base 37: mod_base = OTHER; note = 2'-O-methyl ribonucleotide
  modified_base 38: mod_base = OTHER; note = 2'-O-methyl ribonucleotide
  modified_base 39: mod_base = OTHER; note = 2'-O-methyl ribonucleotide
  modified_base 40: mod_base = OTHER; note = 2'-O-methyl ribonucleotide
  modified_base 41: mod_base = OTHER; note = 2'-O-methyl ribonucleotide
  modified_base 42: mod_base = OTHER; note = 2'-O-methyl ribonucleotide
  modified_base 46: mod_base = OTHER; note = 2'-O-methyl ribonucleotide
  modified_base 48: mod_base = OTHER; note = 2'-O-methyl ribonucleotide
  modified_base 50: mod_base = OTHER; note = 2'-O-methyl ribonucleotide
  modified_base 52: mod_base = OTHER; note = 2'-O-methyl ribonucleotide
  modified_base 53: mod_base = OTHER; note = 2'-O-methyl ribonucleotide
  modified_base 54: mod_base = OTHER; note = 2'-O-methyl ribonucleotide
  modified_base 55: mod_base = OTHER; note = 2'-O-methyl ribonucleotide
  modified_base 56: mod_base = OTHER; note = 2'-O-methyl ribonucleotide
  modified_base 57: mod_base = OTHER; note = 2'-O-methyl ribonucleotide
  modified_base 60: mod_base = OTHER; note = 2'-O-methyl ribonucleotide
  modified_base 61: mod_base = OTHER; note = 2'-O-methyl ribonucleotide
  modified_base 66: mod_base = OTHER; note = 2'-O-methyl ribonucleotide
  modified_base 67: mod_base = OTHER; note = 2'-O-methyl ribonucleotide
  modified_base 70: mod_base = OTHER; note = 2'-O-methyl ribonucleotide
  modified_base 71: mod_base = OTHER; note = 2'-O-methyl ribonucleotide
  modified_base 72: mod_base = OTHER; note = 2'-O-methyl ribonucleotide
  modified_base 74: mod_base = OTHER; note = 2'-O-methyl ribonucleotide
  modified_base 75: mod_base = OTHER; note = 2'-O-methyl ribonucleotide
  modified_base 76: mod_base = OTHER; note = 2'-O-methyl ribonucleotide
  modified_base 77: mod_base = OTHER; note = 2'-O-methyl ribonucleotide
  modified_base 78: mod_base = OTHER; note = 2'-O-methyl ribonucleotide
  modified_base 79: mod_base = OTHER; note = 2'-O-methyl ribonucleotide
  modified_base 80: mod_base = OTHER; note = 2'-O-methyl ribonucleotide
  modified_base 81: mod_base = OTHER; note = 2'-O-methyl ribonucleotide
  modified_base 83: mod_base = OTHER; note = 2'-O-methyl ribonucleotide
  modified_base 84: mod_base = OTHER; note = 2'-O-methyl ribonucleotide
  modified_base 85: mod_base = OTHER; note = 2'-O-methyl ribonucleotide
  modified_base 86: mod_base = OTHER; note = 2'-O-methyl ribonucleotide
  modified_base 87: mod_base = OTHER; note = 2'-O-methyl ribonucleotide
  modified_base 88: mod_base = OTHER; note = 2'-O-methyl ribonucleotide
  modified_base 89: mod_base = OTHER; note = 2'-O-methyl ribonucleotide
  modified_base 90: mod_base = OTHER; note = 2'-O-methyl ribonucleotide
  modified_base 91: mod_base = OTHER; note = 2'-O-methyl ribonucleotide
  modified_base 92: mod_base = OTHER; note = 2'-O-methyl ribonucleotide
  modified_base 93: mod_base = OTHER; note = 2'-O-methyl ribonucleotide
  modified_base 94: mod_base = OTHER; note = 2'-O-methyl ribonucleotide
  modified_base 95: mod_base = OTHER; note = 2'-O-methyl ribonucleotide
  modified_base 96: mod_base = OTHER; note = 2'-O-methyl ribonucleotide
  modified_base 97: mod_base = OTHER; note = 2'-O-methyl ribonucleotide
  modified_base 98: mod_base = OTHER; note = 2'-O-methyl ribonucleotide
  modified_base 99: mod_base = OTHER; note = 2'-O-methyl ribonucleotide
  modified_base 100: mod_base = OTHER; note = 2'-O-methyl ribonucleotide
  modified_base 101: mod_base = OTHER; note = uniform ribonucleotides (A, C, G, inosine or U), deoxynucleotides (A, G, C, inosine or T), ribonebularine, 2'-O-methylnebularine or deoxynebularine
  modified_base 102: mod_base = OTHER; note = uniform ribonucleotides (A, C, G, inosine or U), deoxynucleotides (A, G, C, inosine or T), ribonebularine, 2'-O-methylnebularine or deoxynebularine
  modified_base 103: mod_base = OTHER; note = uniform ribonucleotides (A, C, G, inosine or U), deoxynucleotides (A, G, C, inosine or T), ribonebularine, 2'-O-methylnebularine or deoxynebularine
  modified_base 1..4: mod_base = OTHER; note = phosphorothioate linkage
  modified_base 64..65: mod_base = OTHER; note = phosphorothioate linkage
  modified_base 97..100: mod_base = OTHER; note = phosphorothioate linkage
  misc_feature 1..100: note = RNA
  misc_feature 101..103: note = Optionally DNA or RNA

SEQ ID NO: 2814 - DNA, 103 bp, synthetic construct; identical to SEQ ID NO: 1797
  source 1..103: mol_type = other DNA
  modified_base 1: mod_base = OTHER; note = 2'-O-methyl ribonucleotide
  modified_base 2: mod_base = OTHER; note = 2'-O-methyl ribonucleotide
  modified_base 3: mod_base = OTHER; note = 2'-O-methyl ribonucleotide
  modified_base 21: mod_base = OTHER; note = 2'-O-methyl ribonucleotide
  modified_base 28: mod_base = OTHER; note = 2'-O-methyl ribonucleotide
  modified_base 29: mod_base = OTHER; note = 2'-O-methyl ribonucleotide
  modified_base 30: mod_base = OTHER; note = 2'-O-methyl ribonucleotide
  modified_base 31: mod_base = OTHER; note = 2'-O-methyl ribonucleotide
  modified_base 32: mod_base = OTHER; note = 2'-O-methyl ribonucleotide
  modified_base 33: mod_base = OTHER; note = 2'-O-methyl ribonucleotide
  modified_base 34: mod_base = OTHER; note = 2'-O-methyl ribonucleotide
  modified_base 35: mod_base = OTHER; note = 2'-O-methyl ribonucleotide
  modified_base 36: mod_base = OTHER; note = 2'-O-methyl ribonucleotide
  modified_base 37: mod_base = OTHER; note = 2'-O-methyl ribonucleotide
  modified_base 38: mod_base = OTHER; note = 2'-O-methyl ribonucleotide
  modified_base 39: mod_base = OTHER; note = 2'-O-methyl ribonucleotide
  modified_base 40: mod_base = OTHER; note = 2'-O-methyl ribonucleotide
  modified_base 41: mod_base = OTHER; note = 2'-O-methyl ribonucleotide
  modified_base 42: mod_base = OTHER; note = 2'-O-methyl ribonucleotide
  modified_base 46: mod_base = OTHER; note = 2'-O-methyl ribonucleotide
  modified_base 48: mod_base = OTHER; note = 2'-O-methyl ribonucleotide
  modified_base 50: mod_base = OTHER; note = 2'-O-methyl ribonucleotide
  modified_base 52: mod_base = OTHER; note = 2'-O-methyl ribonucleotide
  modified_base 53: mod_base = OTHER; note = 2'-O-methyl ribonucleotide
  modified_base 54: mod_base = OTHER; note = 2'-O-methyl ribonucleotide
  modified_base 57: mod_base = OTHER; note = 2'-O-methyl ribonucleotide
  modified_base 61: mod_base = OTHER; note = 2'-O-methyl ribonucleotide
  modified_base 66: mod_base = OTHER; note = 2'-O-methyl ribonucleotide
  modified_base 67: mod_base = OTHER; note = 2'-O-methyl ribonucleotide
  modified_base 70: mod_base = OTHER; note = 2'-O-methyl ribonucleotide
  modified_base 71: mod_base = OTHER; note = 2'-O-methyl ribonucleotide
  modified_base 72: mod_base = OTHER; note = 2'-O-methyl ribonucleotide
  modified_base 74: mod_base = OTHER; note = 2'-O-methyl ribonucleotide
  modified_base 75: mod_base = OTHER; note = 2'-O-methyl ribonucleotide
  modified_base 76: mod_base = OTHER; note = 2'-O-methyl ribonucleotide
  modified_base 77: mod_base = OTHER; note = 2'-O-methyl ribonucleotide
  modified_base 78: mod_base = OTHER; note = 2'-O-methyl ribonucleotide
  modified_base 79: mod_base = OTHER; note = 2'-O-methyl ribonucleotide
  modified_base 80: mod_base = OTHER; note = 2'-O-methyl ribonucleotide
  modified_base 82: mod_base = OTHER; note = 2'-O-methyl ribonucleotide
  modified_base 83: mod_base = OTHER; note = 2'-O-methyl ribonucleotide
  modified_base 84: mod_base = OTHER; note = 2'-O-methyl ribonucleotide
  modified_base 85: mod_base = OTHER; note = 2'-O-methyl ribonucleotide
  modified_base 86: mod_base = OTHER; note = 2'-O-methyl ribonucleotide
  modified_base 87: mod_base = OTHER; note = 2'-O-methyl ribonucleotide
  modified_base 89: mod_base = OTHER; note = 2'-O-methyl ribonucleotide
  modified_base 92: mod_base = OTHER; note = 2'-O-methyl ribonucleotide
  modified_base 93: mod_base = OTHER; note = 2'-O-methyl ribonucleotide
  modified_base 94: mod_base = OTHER; note = 2'-O-methyl ribonucleotide
  modified_base 95: mod_base = OTHER; note = 2'-O-methyl ribonucleotide
  modified_base 96: mod_base = OTHER; note = 2'-O-methyl ribonucleotide
  modified_base 97: mod_base = OTHER; note = 2'-O-methyl ribonucleotide
  modified_base 98: mod_base = OTHER; note = 2'-O-methyl ribonucleotide
  modified_base 99: mod_base = OTHER; note = 2'-O-methyl ribonucleotide
  modified_base 100: mod_base = OTHER; note = 2'-O-methyl ribonucleotide
  modified_base 101: mod_base = OTHER; note = uniform ribonucleotides (A, C, G, inosine or U), deoxynucleotides (A, G, C, inosine or T), ribonebularine, 2'-O-methylnebularine or deoxynebularine
  modified_base 102: mod_base = OTHER; note = uniform ribonucleotides (A, C, G, inosine or U), deoxynucleotides (A, G, C, inosine or T), ribonebularine, 2'-O-methylnebularine or deoxynebularine
  modified_base 103: mod_base = OTHER; note = uniform ribonucleotides (A, C, G, inosine or U), deoxynucleotides (A, G, C, inosine or T), ribonebularine, 2'-O-methylnebularine or deoxynebularine
  modified_base 1..4: mod_base = OTHER; note = phosphorothioate linkage
  modified_base 64..65: mod_base = OTHER; note = phosphorothioate linkage
  modified_base 97..100: mod_base = OTHER; note = phosphorothioate linkage
  misc_feature 1..100: note = RNA
  misc_feature 101..103: note = Optionally DNA or RNA

SEQ ID NO: 2815 - DNA, 103 bp, synthetic construct; identical to SEQ ID NO: 1797
  source 1..103: mol_type = other DNA
  modified_base 1: mod_base = OTHER; note = 2'-O-methyl ribonucleotide
  modified_base 2: mod_base = OTHER; note = 2'-O-methyl ribonucleotide
  modified_base 3: mod_base = OTHER; note = 2'-O-methyl ribonucleotide
  modified_base 21: mod_base = OTHER; note = 2'-O-methyl ribonucleotide
  modified_base 28: mod_base = OTHER; note = 2'-O-methyl ribonucleotide
  modified_base 29: mod_base = OTHER; note = 2'-O-methyl ribonucleotide
  modified_base 30: mod_base = OTHER; note = 2'-O-methyl ribonucleotide
  modified_base 31: mod_base = OTHER; note = 2'-O-methyl ribonucleotide
  modified_base 32: mod_base = OTHER; note = 2'-O-methyl ribonucleotide
  modified_base 33: mod_base = OTHER; note = 2'-O-methyl ribonucleotide
  modified_base 34: mod_base = OTHER; note = 2'-O-methyl ribonucleotide
  modified_base 35: mod_base = OTHER; note = 2'-O-methyl ribonucleotide
  modified_base 36: mod_base = OTHER; note = 2'-O-methyl ribonucleotide
  modified_base 37: mod_base = OTHER; note = 2'-O-methyl ribonucleotide
  modified_base 38: mod_base = OTHER; note = 2'-O-methyl ribonucleotide
  modified_base 39: mod_base = OTHER; note = 2'-O-methyl ribonucleotide
  modified_base 40: mod_base = OTHER; note = 2'-O-methyl ribonucleotide
  modified_base 41: mod_base = OTHER; note = 2'-O-methyl ribonucleotide
  modified_base 42: mod_base = OTHER; note = 2'-O-methyl ribonucleotide
  modified_base 46: mod_base = OTHER; note = 2'-O-methyl ribonucleotide
  modified_base 48: mod_base = OTHER; note = 2'-O-methyl ribonucleotide
  modified_base 50: mod_base = OTHER; note = 2'-O-methyl ribonucleotide
  modified_base 52: mod_base = OTHER; note = 2'-O-methyl ribonucleotide
  modified_base 53: mod_base = OTHER; note = 2'-O-methyl ribonucleotide
  modified_base 54: mod_base = OTHER; note = 2'-O-methyl ribonucleotide
  modified_base 55: mod_base = OTHER; note = 2'-O-methyl ribonucleotide
  modified_base 56: mod_base = OTHER; note = 2'-O-methyl ribonucleotide
  modified_base 57: mod_base = OTHER; note = 2'-O-methyl ribonucleotide
  modified_base 60: mod_base = OTHER; note = 2'-O-methyl ribonucleotide
  modified_base 61: mod_base = OTHER; note = 2'-O-methyl ribonucleotide
  modified_base 66: mod_base = OTHER; note = 2'-O-methyl ribonucleotide
  modified_base 67: mod_base = OTHER; note = 2'-O-methyl ribonucleotide
  modified_base 70: mod_base = OTHER; note = 2'-O-methyl ribonucleotide
  modified_base 71: mod_base = OTHER; note = 2'-O-methyl ribonucleotide
  modified_base 72: mod_base = OTHER; note = 2'-O-methyl ribonucleotide
  modified_base 74: mod_base = OTHER; note = 2'-O-methyl ribonucleotide
  modified_base 75: mod_base = OTHER; note = 2'-O-methyl ribonucleotide
  modified_base 76: mod_base = OTHER; note = 2'-O-methyl ribonucleotide
  modified_base 77: mod_base = OTHER; note = 2'-O-methyl ribonucleotide
  modified_base 78: mod_base = OTHER; note = 2'-O-methyl ribonucleotide
  modified_base 79: mod_base = OTHER; note = 2'-O-methyl ribonucleotide
  modified_base 80: mod_base = OTHER; note = 2'-O-methyl ribonucleotide
  modified_base 82: mod_base = OTHER; note = 2'-O-methyl ribonucleotide
  modified_base 83: mod_base = OTHER; note = 2'-O-methyl ribonucleotide
  modified_base 84: mod_base = OTHER; note = 2'-O-methyl ribonucleotide
  modified_base 85: mod_base = OTHER; note = 2'-O-methyl ribonucleotide
  modified_base 86: mod_base = OTHER; note = 2'-O-methyl ribonucleotide
  modified_base 87: mod_base = OTHER; note = 2'-O-methyl ribonucleotide
  modified_base 89: mod_base = OTHER; note = 2'-O-methyl ribonucleotide
  modified_base 92: mod_base = OTHER; note = 2'-O-methyl ribonucleotide
  modified_base 93: mod_base = OTHER; note = 2'-O-methyl ribonucleotide
  modified_base 94: mod_base = OTHER; note = 2'-O-methyl ribonucleotide
  modified_base 95: mod_base = OTHER; note = 2'-O-methyl ribonucleotide
  modified_base 96: mod_base = OTHER; note = 2'-O-methyl ribonucleotide
  modified_base 97: mod_base = OTHER; note = 2'-O-methyl ribonucleotide
  modified_base 98: mod_base = OTHER; note = 2'-O-methyl ribonucleotide
  modified_base 99: mod_base = OTHER; note = 2'-O-methyl ribonucleotide
  modified_base 100: mod_base = OTHER; note = 2'-O-methyl ribonucleotide
  modified_base 101: mod_base = OTHER; note = uniform ribonucleotides (A, C, G, inosine or U), deoxynucleotides (A, G, C, inosine or T), ribonebularine, 2'-O-methylnebularine or deoxynebularine
  modified_base 102: mod_base = OTHER; note = uniform ribonucleotides (A, C, G, inosine or U), deoxynucleotides (A, G, C, inosine or T), ribonebularine, 2'-O-methylnebularine or deoxynebularine
  modified_base 103: mod_base = OTHER; note = uniform ribonucleotides (A, C, G, inosine or U), deoxynucleotides (A, G, C, inosine or T), ribonebularine, 2'-O-methylnebularine or deoxynebularine
  modified_base 1..4: mod_base = OTHER; note = phosphorothioate linkage
  modified_base 64..65: mod_base = OTHER; note = phosphorothioate linkage
  modified_base 97..100: mod_base = OTHER; note = phosphorothioate linkage
  misc_feature 1..100: note = RNA
  misc_feature 101..103: note = Optionally DNA or RNA

SEQ ID NO: 2816 - DNA, 103 bp, synthetic construct; identical to SEQ ID NO: 1797
  source 1..103: mol_type = other DNA
  modified_base 1: mod_base = OTHER; note = 2'-O-methyl ribonucleotide
  modified_base 2: mod_base = OTHER; note = 2'-O-methyl ribonucleotide
  modified_base 3: mod_base = OTHER; note = 2'-O-methyl ribonucleotide
  modified_base 21: mod_base = OTHER; note = 2'-O-methyl ribonucleotide
  modified_base 28: mod_base = OTHER; note = 2'-O-methyl ribonucleotide
  modified_base 29: mod_base = OTHER; note = 2'-O-methyl ribonucleotide
  modified_base 30: mod_base = OTHER; note = 2'-O-methyl ribonucleotide
  modified_base 31: mod_base = OTHER; note = 2'-O-methyl ribonucleotide
  modified_base 32: mod_base = OTHER; note = 2'-O-methyl ribonucleotide
  modified_base 33: mod_base = OTHER; note = 2'-O-methyl ribonucleotide
  modified_base 34: mod_base = OTHER; note = 2'-O-methyl ribonucleotide
  modified_base 35: mod_base = OTHER; note = 2'-O-methyl ribonucleotide
  modified_base 36: mod_base = OTHER; note = 2'-O-methyl ribonucleotide
  modified_base 37: mod_base = OTHER; note = 2'-O-methyl ribonucleotide
  modified_base 38: mod_base = OTHER; note = 2'-O-methyl ribonucleotide
  modified_base 39: mod_base = OTHER; note = 2'-O-methyl ribonucleotide
  modified_base 40: mod_base = OTHER; note = 2'-O-methyl ribonucleotide
  modified_base 41: mod_base = OTHER; note = 2'-O-methyl ribonucleotide
  modified_base 42: mod_base = OTHER; note = 2'-O-methyl ribonucleotide
  modified_base 46: mod_base = OTHER; note = 2'-O-methyl ribonucleotide
  modified_base 48: mod_base = OTHER; note = 2'-O-methyl ribonucleotide
  modified_base 50: mod_base = OTHER; note = 2'-O-methyl ribonucleotide
  modified_base 52: mod_base = OTHER; note = 2'-O-methyl ribonucleotide
  modified_base 53: mod_base = OTHER; note = 2'-O-methyl ribonucleotide
  modified_base 54: mod_base = OTHER; note = 2'-O-methyl ribonucleotide
  modified_base 57: mod_base = OTHER; note = 2'-O-methyl ribonucleotide
  modified_base 61: mod_base = OTHER; note = 2'-O-methyl ribonucleotide
  modified_base 66: mod_base = OTHER; note = 2'-O-methyl ribonucleotide
  modified_base 67: mod_base = OTHER; note = 2'-O-methyl ribonucleotide
  modified_base 70: mod_base = OTHER; note = 2'-O-methyl ribonucleotide
  modified_base 71: mod_base = OTHER; note = 2'-O-methyl ribonucleotide
  modified_base 72: mod_base = OTHER; note = 2'-O-methyl ribonucleotide
  modified_base 73: mod_base = OTHER; note = 2'-O-methyl ribonucleotide
  modified_base 74: mod_base = OTHER; note = 2'-O-methyl ribonucleotide
  modified_base 75: mod_base = OTHER; note = 2'-O-methyl ribonucleotide
  modified_base 76: mod_base = OTHER; note = 2'-O-methyl ribonucleotide
  modified_base 77: mod_base = OTHER; note = 2'-O-methyl ribonucleotide
  modified_base 78: mod_base = OTHER; note = 2'-O-methyl ribonucleotide
  modified_base 79: mod_base = OTHER; note = 2'-O-methyl ribonucleotide
  modified_base 80: mod_base = OTHER; note = 2'-O-methyl ribonucleotide
  modified_base 82: mod_base = OTHER; note = 2'-O-methyl ribonucleotide
  modified_base 83: mod_base = OTHER; note = 2'-O-methyl ribonucleotide
  modified_base 84: mod_base = OTHER; note = 2'-O-methyl ribonucleotide
  modified_base 85: mod_base = OTHER; note = 2'-O-methyl ribonucleotide
  modified_base 86: mod_base = OTHER; note = 2'-O-methyl ribonucleotide
  modified_base 87: mod_base = OTHER; note = 2'-O-methyl ribonucleotide
  modified_base 89: mod_base = OTHER; note = 2'-O-methyl ribonucleotide
  modified_base 92: mod_base = OTHER; note = 2'-O-methyl ribonucleotide
  modified_base 93: mod_base = OTHER; note = 2'-O-methyl ribonucleotide
  modified_base 94: mod_base = OTHER; note = 2'-O-methyl ribonucleotide
  modified_base 95: mod_base = OTHER; note = 2'-O-methyl ribonucleotide
  modified_base 96: mod_base = OTHER; note = 2'-O-methyl ribonucleotide
  modified_base 97: mod_base = OTHER; note = 2'-O-methyl ribonucleotide
  modified_base 98: mod_base = OTHER; note = 2'-O-methyl ribonucleotide
  modified_base 99: mod_base = OTHER; note = 2'-O-methyl ribonucleotide
  modified_base 100: mod_base = OTHER; note = 2'-O-methyl ribonucleotide
  modified_base 101: mod_base = OTHER; note = uniform ribonucleotides (A, C, G, inosine or U), deoxynucleotides (A, G, C, inosine or T), ribonebularine, 2'-O-methylnebularine or deoxynebularine
  modified_base 102: mod_base = OTHER; note = uniform ribonucleotides (A, C, G, inosine or U), deoxynucleotides (A, G, C, inosine or T), ribonebularine, 2'-O-methylnebularine or deoxynebularine
  modified_base 103: mod_base = OTHER; note = uniform ribonucleotides (A, C, G, inosine or U), deoxynucleotides (A, G, C, inosine or T), ribonebularine, 2'-O-methylnebularine or deoxynebularine
  modified_base 1..4: mod_base = OTHER; note = phosphorothioate linkage
  modified_base 64..65: mod_base = OTHER; note = phosphorothioate linkage
  modified_base 97..100: mod_base = OTHER; note = phosphorothioate linkage
  misc_feature 1..100: note = RNA
  misc_feature 101..103: note = Optionally DNA or RNA

SEQ ID NO: 2817 - DNA, 103 bp, synthetic construct; identical to SEQ ID NO: 1797
  source 1..103: mol_type = other DNA
  modified_base 1: mod_base = OTHER; note = 2'-O-methyl ribonucleotide
  modified_base 2: mod_base = OTHER; note = 2'-O-methyl ribonucleotide
  modified_base 3: mod_base = OTHER; note = 2'-O-methyl ribonucleotide
  modified_base 21: mod_base = OTHER; note = 2'-O-methyl ribonucleotide
  modified_base 28: mod_base = OTHER; note = 2'-O-methyl ribonucleotide
  modified_base 29: mod_base = OTHER; note = 2'-O-methyl ribonucleotide
  modified_base 30: mod_base = OTHER; note = 2'-O-methyl ribonucleotide
  modified_base 31: mod_base = OTHER; note = 2'-O-methyl ribonucleotide
  modified_base 32: mod_base = OTHER; note = 2'-O-methyl ribonucleotide
  modified_base 33: mod_base = OTHER; note = 2'-O-methyl ribonucleotide
  modified_base 34: mod_base = OTHER; note = 2'-O-methyl ribonucleotide
  modified_base 35: mod_base = OTHER; note = 2'-O-methyl ribonucleotide
  modified_base 36: mod_base = OTHER; note = 2'-O-methyl ribonucleotide
  modified_base 37: mod_base = OTHER; note = 2'-O-methyl ribonucleotide
  modified_base 38: mod_base = OTHER; note = 2'-O-methyl ribonucleotide
  modified_base 39: mod_base = OTHER; note = 2'-O-methyl ribonucleotide
  modified_base 40: mod_base = OTHER; note = 2'-O-methyl ribonucleotide
  modified_base 41: mod_base = OTHER; note = 2'-O-methyl ribonucleotide
  modified_base 42: mod_base = OTHER; note = 2'-O-methyl ribonucleotide
  modified_base 46: mod_base = OTHER; note = 2'-O-methyl ribonucleotide
  modified_base 48: mod_base = OTHER; note = 2'-O-methyl ribonucleotide
  modified_base 50: mod_base = OTHER; note = 2'-O-methyl ribonucleotide
  modified_base 52: mod_base = OTHER; note = 2'-O-methyl ribonucleotide
  modified_base 53: mod_base = OTHER; note = 2'-O-methyl ribonucleotide
  modified_base 54: mod_base = OTHER; note = 2'-O-methyl ribonucleotide
  modified_base 57: mod_base = OTHER; note = 2'-O-methyl ribonucleotide
  modified_base 61: mod_base = OTHER; note = 2'-O-methyl ribonucleotide
  modified_base 66: mod_base = OTHER; note = 2'-O-methyl ribonucleotide
  modified_base 67: mod_base = OTHER; note = 2'-O-methyl ribonucleotide
  modified_base 70: mod_base = OTHER; note = 2'-O-methyl ribonucleotide
  modified_base 71: mod_base = OTHER; note = 2'-O-methyl ribonucleotide
  modified_base 72: mod_base = OTHER; note = 2'-O-methyl ribonucleotide
  modified_base 73: mod_base = OTHER; note = 2'-O-methyl ribonucleotide
  modified_base 74: mod_base = OTHER; note = 2'-O-methyl ribonucleotide
  modified_base 75: mod_base = OTHER; note = 2'-O-methyl ribonucleotide
  modified_base 76: mod_base = OTHER; note = 2'-O-methyl ribonucleotide
  modified_base 77: mod_base = OTHER; note = 2'-O-methyl ribonucleotide
  modified_base 78: mod_base = OTHER; note = 2'-O-methyl ribonucleotide
  modified_base 79: mod_base = OTHER; note = 2'-O-methyl ribonucleotide
  modified_base 80: mod_base = OTHER; note = 2'-O-methyl ribonucleotide
  modified_base 82: mod_base = OTHER; note = 2'-O-methyl ribonucleotide
  modified_base 83: mod_base = OTHER; note = 2'-O-methyl ribonucleotide
  modified_base 84: mod_base = OTHER; note = 2'-O-methyl ribonucleotide
  modified_base 85: mod_base = OTHER; note = 2'-O-methyl ribonucleotide
  modified_base 86: mod_base = OTHER; note = 2'-O-methyl ribonucleotide
  modified_base 87: mod_base = OTHER; note = 2'-O-methyl ribonucleotide
  modified_base 89: mod_base = OTHER; note = 2'-O-methyl ribonucleotide
  modified_base 91: mod_base = OTHER; note = 2'-O-methyl ribonucleotide
  modified_base 92: mod_base = OTHER; note = 2'-O-methyl ribonucleotide
  modified_base 93: mod_base = OTHER; note = 2'-O-methyl ribonucleotide
  modified_base 94: mod_base = OTHER; note = 2'-O-methyl ribonucleotide
  modified_base 95: mod_base = OTHER; note = 2'-O-methyl ribonucleotide
  modified_base 96: mod_base = OTHER; note = 2'-O-methyl ribonucleotide
  modified_base 97: mod_base = OTHER; note = 2'-O-methyl ribonucleotide
  modified_base 98: mod_base = OTHER; note = 2'-O-methyl ribonucleotide
  modified_base 99: mod_base = OTHER; note = 2'-O-methyl ribonucleotide
  modified_base 100: mod_base = OTHER; note = 2'-O-methyl ribonucleotide
  modified_base 101: mod_base = OTHER; note = uniform ribonucleotides (A, C, G, inosine or U), deoxynucleotides (A, G, C, inosine or T), ribonebularine, 2'-O-methylnebularine or deoxynebularine
  modified_base 102: mod_base = OTHER; note = uniform ribonucleotides (A, C, G, inosine or U), deoxynucleotides (A, G, C, inosine or T), ribonebularine, 2'-O-methylnebularine or deoxynebularine
  modified_base 103: mod_base = OTHER; note = uniform ribonucleotides (A, C, G, inosine or U), deoxynucleotides (A, G, C, inosine or T), ribonebularine, 2'-O-methylnebularine or deoxynebularine
  modified_base 1..4: mod_base = OTHER; note = phosphorothioate linkage
  modified_base 64..65: mod_base = OTHER; note = phosphorothioate linkage
  modified_base 97..100: mod_base = OTHER; note = phosphorothioate linkage
  misc_feature 1..100: note = RNA
  misc_feature 101..103: note = Optionally DNA or RNA

SEQ ID NO: 2818 - DNA, 103 bp, synthetic construct; identical to SEQ ID NO: 1797
  source 1..103: mol_type = other DNA
  modified_base 1: mod_base = OTHER; note = 2'-O-methyl ribonucleotide
  modified_base 2: mod_base = OTHER; note = 2'-O-methyl ribonucleotide
  modified_base 3: mod_base = OTHER; note = 2'-O-methyl ribonucleotide
  modified_base 21: mod_base = OTHER; note = 2'-O-methyl ribonucleotide
  modified_base 28: mod_base = OTHER; note = 2'-O-methyl ribonucleotide
  modified_base 29: mod_base = OTHER; note = 2'-O-methyl ribonucleotide
  modified_base 30: mod_base = OTHER; note = 2'-O-methyl ribonucleotide
  modified_base 31: mod_base = OTHER; note = 2'-O-methyl ribonucleotide
  modified_base 32: mod_base = OTHER; note = 2'-O-methyl ribonucleotide
  modified_base 34: mod_base = OTHER; note = 2'-O-methyl ribonucleotide
  modified_base 35: mod_base = OTHER; note = 2'-O-methyl ribonucleotide
  modified_base 36: mod_base = OTHER; note = 2'-O-methyl ribonucleotide
  modified_base 37: mod_base = OTHER; note = 2'-O-methyl ribonucleotide
  modified_base 38: mod_base = OTHER; note = 2'-O-methyl ribonucleotide
  modified_base 39: mod_base = OTHER; note = 2'-O-methyl ribonucleotide
  modified_base 40: mod_base = OTHER; note = 2'-O-methyl ribonucleotide
  modified_base 41: mod_base = OTHER; note = 2'-O-methyl ribonucleotide
  modified_base 42: mod_base = OTHER; note = 2'-O-methyl ribonucleotide
  modified_base 46: mod_base = OTHER; note = 2'-O-methyl ribonucleotide
  modified_base 48: mod_base = OTHER; note = 2'-O-methyl ribonucleotide
  modified_base 50: mod_base = OTHER; note = 2'-O-methyl ribonucleotide
  modified_base 52: mod_base = OTHER; note = 2'-O-methyl ribonucleotide
  modified_base 53: mod_base = OTHER; note = 2'-O-methyl ribonucleotide
  modified_base 54: mod_base = OTHER; note = 2'-O-methyl ribonucleotide
  modified_base 57: mod_base = OTHER; note = 2'-O-methyl ribonucleotide
  modified_base 61: mod_base = OTHER; note = 2'-O-methyl ribonucleotide
  modified_base 66: mod_base = OTHER; note = 2'-O-methyl ribonucleotide
  modified_base 67: mod_base = OTHER; note = 2'-O-methyl ribonucleotide
  modified_base 70: mod_base = OTHER; note = 2'-O-methyl ribonucleotide
  modified_base 71: mod_base = OTHER; note = 2'-O-methyl ribonucleotide
  modified_base 72: mod_base = OTHER; note = 2'-O-methyl ribonucleotide
  modified_base 73: mod_base = OTHER; note = 2'-O-methyl ribonucleotide
  modified_base 74: mod_base = OTHER; note = 2'-O-methyl ribonucleotide
  modified_base 75: mod_base = OTHER; note = 2'-O-methyl ribonucleotide
  modified_base 76: mod_base = OTHER; note = 2'-O-methyl ribonucleotide
  modified_base 77: mod_base = OTHER; note = 2'-O-methyl ribonucleotide
  modified_base 78: mod_base = OTHER; note = 2'-O-methyl ribonucleotide
  modified_base 79: mod_base = OTHER; note = 2'-O-methyl ribonucleotide
  modified_base 80: mod_base = OTHER; note = 2'-O-methyl ribonucleotide
  modified_base 82: mod_base = OTHER; note = 2'-O-methyl ribonucleotide
  modified_base 83: mod_base = OTHER; note = 2'-O-methyl ribonucleotide
  modified_base 84: mod_base = OTHER; note = 2'-O-methyl ribonucleotide
  modified_base 85: mod_base = OTHER; note = 2'-O-methyl ribonucleotide
  modified_base 86: mod_base = OTHER; note = 2'-O-methyl ribonucleotide
  modified_base 87: mod_base = OTHER; note = 2'-O-methyl ribonucleotide
  modified_base 89: mod_base = OTHER; note = 2'-O-methyl ribonucleotide
  modified_base 92: mod_base = OTHER; note = 2'-O-methyl ribonucleotide
  modified_base 93: mod_base = OTHER; note = 2'-O-methyl ribonucleotide
  modified_base 94: mod_base = OTHER; note = 2'-O-methyl ribonucleotide
  modified_base 95: mod_base = OTHER; note = 2'-O-methyl ribonucleotide
  modified_base 96: mod_base = OTHER; note = 2'-O-methyl ribonucleotide
  modified_base 97: mod_base = OTHER; note = 2'-O-methyl ribonucleotide
  modified_base 98: mod_base = OTHER; note = 2'-O-methyl ribonucleotide
  modified_base 99: mod_base = OTHER; note = 2'-O-methyl ribonucleotide
  modified_base 100: mod_base = OTHER; note = 2'-O-methyl ribonucleotide
  modified_base 101: mod_base = OTHER; note = uniform ribonucleotides (A, C, G, inosine or U), deoxynucleotides (A, G, C, inosine or T), ribonebularine, 2'-O-methylnebularine or deoxynebularine
  modified_base 102: mod_base = OTHER; note = uniform ribonucleotides (A, C, G, inosine or U), deoxynucleotides (A, G, C, inosine or T), ribonebularine, 2'-O-methylnebularine or deoxynebularine
  modified_base 103: mod_base = OTHER; note = uniform ribonucleotides (A, C, G, inosine or U), deoxynucleotides (A, G, C, inosine or T), ribonebularine, 2'-O-methylnebularine or deoxynebularine
  modified_base 1..4: mod_base = OTHER; note = phosphorothioate linkage
  modified_base 64..65: mod_base = OTHER; note = phosphorothioate linkage
  modified_base 97..100: mod_base = OTHER; note = phosphorothioate linkage
  misc_feature 1..100: note = RNA
  misc_feature 101..103: note = Optionally DNA or RNA

SEQ ID NO: 2819 - DNA, 103 bp, synthetic construct; identical to SEQ ID NO: 1797
  source 1..103: mol_type = other DNA
  modified_base 1: mod_base = OTHER; note = 2'-O-methyl ribonucleotide
  modified_base 2: mod_base = OTHER; note = 2'-O-methyl ribonucleotide
  modified_base 3: mod_base = OTHER; note = 2'-O-methyl ribonucleotide
  modified_base 21: mod_base = OTHER; note = 2'-O-methyl ribonucleotide
  modified_base 28: mod_base = OTHER; note = 2'-O-methyl ribonucleotide
  modified_base 29: mod_base = OTHER; note = 2'-O-methyl ribonucleotide
  modified_base 30: mod_base = OTHER; note = 2'-O-methyl ribonucleotide
  modified_base 31: mod_base = OTHER; note = 2'-O-methyl ribonucleotide
  modified_base 32: mod_base = OTHER; note = 2'-O-methyl ribonucleotide
  modified_base 34: mod_base = OTHER; note = 2'-O-methyl ribonucleotide
  modified_base 35: mod_base = OTHER; note = 2'-O-methyl ribonucleotide
  modified_base 36: mod_base = OTHER; note = 2'-O-methyl ribonucleotide
  modified_base 37: mod_base = OTHER; note = 2'-O-methyl ribonucleotide
  modified_base 38: mod_base = OTHER; note = 2'-O-methyl ribonucleotide
  modified_base 39: mod_base = OTHER; note = 2'-O-methyl ribonucleotide
  modified_base 40: mod_base = OTHER; note = 2'-O-methyl ribonucleotide
  modified_base 41: mod_base = OTHER; note = 2'-O-methyl ribonucleotide
  modified_base 42: mod_base = OTHER; note = 2'-O-methyl ribonucleotide
  modified_base 46: mod_base = OTHER; note = 2'-O-methyl ribonucleotide
  modified_base 48: mod_base = OTHER; note = 2'-O-methyl ribonucleotide
  modified_base 50: mod_base = OTHER; note = 2'-O-methyl ribonucleotide
  modified_base 52: mod_base = OTHER; note = 2'-O-methyl ribonucleotide
  modified_base 53: mod_base = OTHER; note = 2'-O-methyl ribonucleotide
  modified_base 54: mod_base = OTHER; note = 2'-O-methyl ribonucleotide
  modified_base 57: mod_base = OTHER; note = 2'-O-methyl ribonucleotide
  modified_base 61: mod_base = OTHER; note = 2'-O-methyl ribonucleotide
  modified_base 66: mod_base = OTHER; note = 2'-O-methyl ribonucleotide
  modified_base 67: mod_base = OTHER; note = 2'-O-methyl ribonucleotide
  modified_base 70: mod_base = OTHER; note = 2'-O-methyl ribonucleotide
  modified_base 71: mod_base = OTHER; note = 2'-O-methyl ribonucleotide
  modified_base 72: mod_base = OTHER; note = 2'-O-methyl ribonucleotide
  modified_base 73: mod_base = OTHER; note = 2'-O-methyl ribonucleotide
  modified_base 74: mod_base = OTHER; note = 2'-O-methyl ribonucleotide
  modified_base 75: mod_base = OTHER; note = 2'-O-methyl ribonucleotide
  modified_base 76: mod_base = OTHER; note = 2'-O-methyl ribonucleotide
  modified_base 77: mod_base = OTHER; note = 2'-O-methyl ribonucleotide
  modified_base 78: mod_base = OTHER; note = 2'-O-methyl ribonucleotide
  modified_base 79: mod_base = OTHER; note = 2'-O-methyl ribonucleotide
  modified_base 80: mod_base = OTHER; note = 2'-O-methyl ribonucleotide
  modified_base 82: mod_base = OTHER; note = 2'-O-methyl ribonucleotide
  modified_base 83: mod_base = OTHER; note = 2'-O-methyl ribonucleotide
  modified_base 84: mod_base = OTHER; note = 2'-O-methyl ribonucleotide
  modified_base 85: mod_base = OTHER; note = 2'-O-methyl ribonucleotide
  modified_base 86: mod_base = OTHER; note = 2'-O-methyl ribonucleotide
  modified_base 87: mod_base = OTHER; note = 2'-O-methyl ribonucleotide
  modified_base 89: mod_base = OTHER; note = 2'-O-methyl ribonucleotide
  modified_base 91: mod_base = OTHER; note = 2'-O-methyl ribonucleotide
  modified_base 92: mod_base = OTHER; note = 2'-O-methyl ribonucleotide
  modified_base 93: mod_base = OTHER; note = 2'-O-methyl ribonucleotide
  modified_base 94: mod_base = OTHER; note = 2'-O-methyl ribonucleotide
  modified_base 95: mod_base = OTHER; note = 2'-O-methyl ribonucleotide
  modified_base 96: mod_base = OTHER; note = 2'-O-methyl ribonucleotide
  modified_base 97: mod_base = OTHER; note = 2'-O-methyl ribonucleotide
  modified_base 98: mod_base = OTHER; note = 2'-O-methyl ribonucleotide
  modified_base 99: mod_base = OTHER; note = 2'-O-methyl ribonucleotide
  modified_base 100: mod_base = OTHER; note = 2'-O-methyl ribonucleotide
  modified_base 101: mod_base = OTHER; note = uniform ribonucleotides (A, C, G, inosine or U), deoxynucleotides (A, G, C, inosine or T), ribonebularine, 2'-O-methylnebularine or deoxynebularine
  modified_base 102: mod_base = OTHER; note = uniform ribonucleotides (A, C, G, inosine or U), deoxynucleotides (A, G, C, inosine or T), ribonebularine, 2'-O-methylnebularine or deoxynebularine
  modified_base 103: mod_base = OTHER; note = uniform ribonucleotides (A, C, G, inosine or U), deoxynucleotides (A, G, C, inosine or T), ribonebularine, 2'-O-methylnebularine or deoxynebularine
  modified_base 1..4: mod_base = OTHER; note = phosphorothioate linkage
  modified_base 64..65: mod_base = OTHER; note = phosphorothioate linkage
  modified_base 97..100: mod_base = OTHER; note = phosphorothioate linkage
  misc_feature 1..100: note = RNA
  misc_feature 101..103: note = Optionally DNA or RNA

SEQ ID NO: 2820 - DNA, 103 bp, synthetic construct; identical to SEQ ID NO: 1797
  source 1..103: mol_type = other DNA
  modified_base 1: mod_base = OTHER; note = 2'-O-methyl ribonucleotide
  modified_base 2: mod_base = OTHER; note = 2'-O-methyl ribonucleotide
  modified_base 3: mod_base = OTHER; note = 2'-O-methyl ribonucleotide
  modified_base 21: mod_base = OTHER; note = 2'-O-methyl ribonucleotide
  modified_base 28: mod_base = OTHER; note = 2'-O-methyl ribonucleotide
  modified_base 29: mod_base = OTHER; note = 2'-O-methyl ribonucleotide
  modified_base 30: mod_base = OTHER; note = 2'-O-methyl ribonucleotide
  modified_base 31: mod_base = OTHER; note = 2'-O-methyl ribonucleotide
  modified_base 32: mod_base = OTHER; note = 2'-O-methyl ribonucleotide
  modified_base 34: mod_base = OTHER; note = 2'-O-methyl ribonucleotide
  modified_base 35: mod_base = OTHER; note = 2'-O-methyl ribonucleotide
  modified_base 36: mod_base = OTHER; note = 2'-O-methyl ribonucleotide
  modified_base 37: mod_base = OTHER; note = 2'-O-methyl ribonucleotide
  modified_base 38: mod_base = OTHER; note = 2'-O-methyl ribonucleotide
  modified_base 39: mod_base = OTHER; note = 2'-O-methyl ribonucleotide
  modified_base 40: mod_base = OTHER; note = 2'-O-methyl ribonucleotide
  modified_base 41: mod_base = OTHER; note = 2'-O-methyl ribonucleotide
  modified_base 42: mod_base = OTHER; note = 2'-O-methyl ribonucleotide
  modified_base 46: mod_base = OTHER; note = 2'-O-methyl ribonucleotide
  modified_base 48: mod_base = OTHER; note = 2'-O-methyl ribonucleotide
  modified_base 50: mod_base = OTHER; note = 2'-O-methyl ribonucleotide
  modified_base 52: mod_base = OTHER; note = 2'-O-methyl ribonucleotide
  modified_base 53: mod_base = OTHER; note = 2'-O-methyl ribonucleotide
  modified_base 54: mod_base = OTHER; note = 2'-O-methyl ribonucleotide
  modified_base 55: mod_base = OTHER; note = 2'-O-methyl ribonucleotide
  modified_base 56: mod_base = OTHER; note = 2'-O-methyl ribonucleotide
  modified_base 57: mod_base = OTHER; note = 2'-O-methyl ribonucleotide
  modified_base 60: mod_base = OTHER; note = 2'-O-methyl ribonucleotide
  modified_base 61: mod_base = OTHER; note = 2'-O-methyl ribonucleotide
  modified_base 66: mod_base = OTHER; note = 2'-O-methyl ribonucleotide
  modified_base 67: mod_base = OTHER; note = 2'-O-methyl ribonucleotide
  modified_base 70: mod_base = OTHER; note = 2'-O-methyl ribonucleotide
  modified_base 71: mod_base = OTHER; note = 2'-O-methyl ribonucleotide
  modified_base 72: mod_base = OTHER; note = 2'-O-methyl ribonucleotide
  modified_base 74: mod_base = OTHER; note = 2'-O-methyl ribonucleotide
  modified_base 75: mod_base = OTHER; note = 2'-O-methyl ribonucleotide
  modified_base 76: mod_base = OTHER; note = 2'-O-methyl ribonucleotide
  modified_base 77: mod_base = OTHER; note = 2'-O-methyl ribonucleotide
  modified_base 78: mod_base = OTHER; note = 2'-O-methyl ribonucleotide
  modified_base 79: mod_base = OTHER; note = 2'-O-methyl ribonucleotide
  modified_base 80: mod_base = OTHER; note = 2'-O-methyl ribonucleotide
  modified_base 82: mod_base = OTHER; note = 2'-O-methyl ribonucleotide
  modified_base 83: mod_base = OTHER; note = 2'-O-methyl ribonucleotide
  modified_base 84: mod_base = OTHER; note = 2'-O-methyl ribonucleotide
  modified_base 85: mod_base = OTHER; note = 2'-O-methyl ribonucleotide
  modified_base 86: mod_base = OTHER; note = 2'-O-methyl ribonucleotide
  modified_base 87: mod_base = OTHER; note = 2'-O-methyl ribonucleotide
  modified_base 89: mod_base = OTHER; note = 2'-O-methyl ribonucleotide
  modified_base 92: mod_base = OTHER; note = 2'-O-methyl ribonucleotide
  modified_base 93: mod_base = OTHER; note = 2'-O-methyl ribonucleotide
  modified_base 94: mod_base = OTHER; note = 2'-O-methyl ribonucleotide
  modified_base 95: mod_base = OTHER; note = 2'-O-methyl ribonucleotide
  modified_base 96: mod_base = OTHER; note = 2'-O-methyl ribonucleotide
  modified_base 97: mod_base = OTHER; note = 2'-O-methyl ribonucleotide
  modified_base 98: mod_base = OTHER; note = 2'-O-methyl ribonucleotide
  modified_base 99: mod_base = OTHER; note = 2'-O-methyl ribonucleotide
  modified_base 100: mod_base = OTHER; note = 2'-O-methyl ribonucleotide
  modified_base 101: mod_base = OTHER; note = uniform ribonucleotides (A, C, G, inosine or U), deoxynucleotides (A, G, C, inosine or T), ribonebularine, 2'-O-methylnebularine or deoxynebularine
  modified_base 102: mod_base = OTHER; note = uniform ribonucleotides (A, C, G, inosine or U), deoxynucleotides (A, G, C, inosine or T), ribonebularine, 2'-O-methylnebularine or deoxynebularine
  modified_base 103: mod_base = OTHER; note = uniform ribonucleotides (A, C, G, inosine or U), deoxynucleotides (A, G, C, inosine or T), ribonebularine, 2'-O-methylnebularine or deoxynebularine
  modified_base 1..4: mod_base = OTHER; note = phosphorothioate linkage
  modified_base 64..65: mod_base = OTHER; note = phosphorothioate linkage
  modified_base 97..100: mod_base = OTHER; note = phosphorothioate linkage
  misc_feature 1..100: note = RNA
  misc_feature 101..103: note = Optionally DNA or RNA

SEQ ID NO: 2821 - DNA, 103 bp, synthetic construct; identical to SEQ ID NO: 1795
  source 1..103: mol_type = other DNA
  modified_base 1: mod_base = OTHER; note = 2'-O-methyl ribonucleotide
  modified_base 2: mod_base = OTHER; note = 2'-O-methyl ribonucleotide
  modified_base 3: mod_base = OTHER; note = 2'-O-methyl ribonucleotide
  modified_base 21: mod_base = OTHER; note = 2'-O-methyl ribonucleotide
  modified_base 28: mod_base = OTHER; note = 2'-O-methyl ribonucleotide
  modified_base 29: mod_base = OTHER; note = 2'-O-methyl ribonucleotide
  modified_base 30: mod_base = OTHER; note = 2'-O-methyl ribonucleotide
  modified_base 31: mod_base = OTHER; note = 2'-O-methyl ribonucleotide
  modified_base 32: mod_base = OTHER; note = 2'-O-methyl ribonucleotide
  modified_base 33: mod_base = OTHER; note = 2'-O-methyl ribonucleotide
  modified_base 34: mod_base = OTHER; note = 2'-O-methyl ribonucleotide
  modified_base 35: mod_base = OTHER; note = 2'-O-methyl ribonucleotide
  modified_base 36: mod_base = OTHER; note = 2'-O-methyl ribonucleotide
  modified_base 37: mod_base = OTHER; note = 2'-O-methyl ribonucleotide
  modified_base 38: mod_base = OTHER; note = 2'-O-methyl ribonucleotide
  modified_base 39: mod_base = OTHER; note = 2'-O-methyl ribonucleotide
  modified_base 40: mod_base = OTHER; note = 2'-O-methyl ribonucleotide
  modified_base 41: mod_base = OTHER; note = 2'-O-methyl ribonucleotide
  modified_base 42: mod_base = OTHER; note = 2'-O-methyl ribonucleotide
  modified_base 46: mod_base = OTHER; note = 2'-O-methyl ribonucleotide
  modified_base 48: mod_base = OTHER; note = 2'-O-methyl ribonucleotide
  modified_base 50: mod_base = OTHER; note = 2'-O-methyl ribonucleotide
  modified_base 52: mod_base = OTHER; note = 2'-O-methyl ribonucleotide
  modified_base 53: mod_base = OTHER; note = 2'-O-methyl ribonucleotide
  modified_base 54: mod_base = OTHER; note = 2'-O-methyl ribonucleotide
  modified_base 55: mod_base = OTHER; note = 2'-O-methyl ribonucleotide
  modified_base 56: mod_base = OTHER; note = 2'-O-methyl ribonucleotide
  modified_base 57: mod_base = OTHER; note = 2'-O-methyl ribonucleotide
  modified_base 60: mod_base = OTHER; note = 2'-O-methyl ribonucleotide
  modified_base 61: mod_base = OTHER; note = 2'-O-methyl ribonucleotide
  modified_base 66: mod_base = OTHER; note = 2'-O-methyl ribonucleotide
  modified_base 67: mod_base = OTHER; note = 2'-O-methyl ribonucleotide
  modified_base 70: mod_base = OTHER; note = 2'-O-methyl ribonucleotide
  modified_base 71: mod_base = OTHER; note = 2'-O-methyl ribonucleotide
  modified_base 72: mod_base = OTHER; note = 2'-O-methyl ribonucleotide
  modified_base 73: mod_base = OTHER; note = 2'-O-methyl ribonucleotide
  modified_base 74: mod_base = OTHER; note = 2'-O-methyl ribonucleotide
  modified_base 75: mod_base = OTHER; note = 2'-O-methyl ribonucleotide
  modified_base 76: mod_base = OTHER; note = 2'-O-methyl ribonucleotide
  modified_base 77: mod_base = OTHER; note = 2'-O-methyl ribonucleotide
  modified_base 78: mod_base = OTHER; note = 2'-O-methyl ribonucleotide
  modified_base 79: mod_base = OTHER; note = 2'-O-methyl ribonucleotide
  modified_base 80: mod_base = OTHER; note = 2'-O-methyl ribonucleotide
  modified_base 81: mod_base = OTHER; note = 2'-O-methyl ribonucleotide
  modified_base 83: mod_base = OTHER; note = 2'-O-methyl ribonucleotide
  modified_base 84: mod_base = OTHER; note = 2'-O-methyl ribonucleotide
  modified_base 85: mod_base = OTHER; note = 2'-O-methyl ribonucleotide
  modified_base 86: mod_base = OTHER; note = 2'-O-methyl ribonucleotide
  modified_base 87: mod_base = OTHER; note = 2'-O-methyl ribonucleotide
  modified_base 88: mod_base = OTHER; note = 2'-O-methyl ribonucleotide
  modified_base 89: mod_base = OTHER; note = 2'-O-methyl ribonucleotide
  modified_base 90: mod_base = OTHER; note = 2'-O-methyl ribonucleotide
  modified_base 91: mod_base = OTHER; note = 2'-O-methyl ribonucleotide
  modified_base 92: mod_base = OTHER; note = 2'-O-methyl ribonucleotide
  modified_base 93: mod_base = OTHER; note = 2'-O-methyl ribonucleotide
  modified_base 94: mod_base = OTHER; note = 2'-O-methyl ribonucleotide
  modified_base 95: mod_base = OTHER; note = 2'-O-methyl ribonucleotide
  modified_base 96: mod_base = OTHER; note = 2'-O-methyl ribonucleotide
  modified_base 97: mod_base = OTHER; note = 2'-O-methyl ribonucleotide
  modified_base 98: mod_base = OTHER; note = 2'-O-methyl ribonucleotide
  modified_base 99: mod_base = OTHER; note = 2'-O-methyl ribonucleotide
  modified_base 100: mod_base = OTHER; note = 2'-O-methyl ribonucleotide
  modified_base 101: mod_base = OTHER; note = uniform ribonucleotides (A, C, G, inosine or U), deoxynucleotides (A, G, C, inosine or T), ribonebularine, 2'-O-methylnebularine or deoxynebularine
  modified_base 102: mod_base = OTHER; note = uniform ribonucleotides (A, C, G, inosine or U), deoxynucleotides (A, G, C, inosine or T), ribonebularine, 2'-O-methylnebularine or deoxynebularine
  modified_base 103: mod_base = OTHER; note = uniform ribonucleotides (A, C, G, inosine or U), deoxynucleotides (A, G, C, inosine or T), ribonebularine, 2'-O-methylnebularine or deoxynebularine
  modified_base 1..4: mod_base = OTHER; note = phosphorothioate linkage
  modified_base 45..46: mod_base = OTHER; note = phosphorothioate linkage
  modified_base 97..100: mod_base = OTHER; note = phosphorothioate linkage
  misc_feature 1..100: note = RNA
  misc_feature 101..103: note = Optionally DNA or RNA

SEQ ID NO: 2822 - DNA, 103 bp, synthetic construct; identical to SEQ ID NO: 1795
  source 1..103: mol_type = other DNA
  modified_base 1: mod_base = OTHER; note = 2'-O-methyl ribonucleotide
  modified_base 2: mod_base = OTHER; note = 2'-O-methyl ribonucleotide
  modified_base 3: mod_base = OTHER; note = 2'-O-methyl ribonucleotide
  modified_base 21: mod_base = OTHER; note = 2'-O-methyl ribonucleotide
  modified_base 28: mod_base = OTHER; note = 2'-O-methyl ribonucleotide
  modified_base 29: mod_base = OTHER; note = 2'-O-methyl ribonucleotide
  modified_base 30: mod_base = OTHER; note = 2'-O-methyl ribonucleotide
  modified_base 31: mod_base = OTHER; note = 2'-O-methyl ribonucleotide
  modified_base 32: mod_base = OTHER; note = 2'-O-methyl ribonucleotide
  modified_base 34: mod_base = OTHER; note = 2'-O-methyl ribonucleotide
  modified_base 35: mod_base = OTHER; note = 2'-O-methyl ribonucleotide
  modified_base 36: mod_base = OTHER; note = 2'-O-methyl ribonucleotide
  modified_base 37: mod_base = OTHER; note = 2'-O-methyl ribonucleotide
  modified_base 38: mod_base = OTHER; note = 2'-O-methyl ribonucleotide
  modified_base 39: mod_base = OTHER; note = 2'-O-methyl ribonucleotide
  modified_base 40: mod_base = OTHER; note = 2'-O-methyl ribonucleotide
  modified_base 41: mod_base = OTHER; note = 2'-O-methyl ribonucleotide
  modified_base 42: mod_base = OTHER; note = 2'-O-methyl ribonucleotide
  modified_base 46: mod_base = OTHER; note = 2'-O-methyl ribonucleotide
  modified_base 48: mod_base = OTHER; note = 2'-O-methyl ribonucleotide
  modified_base 50: mod_base = OTHER; note = 2'-O-methyl ribonucleotide
  modified_base 52: mod_base = OTHER; note = 2'-O-methyl ribonucleotide
  modified_base 53: mod_base = OTHER; note = 2'-O-methyl ribonucleotide
  modified_base 54: mod_base = OTHER; note = 2'-O-methyl ribonucleotide
  modified_base 55: mod_base = OTHER; note = 2'-O-methyl ribonucleotide
  modified_base 56: mod_base = OTHER; note = 2'-O-methyl ribonucleotide
  modified_base 57: mod_base = OTHER; note = 2'-O-methyl ribonucleotide
  modified_base 60: mod_base = OTHER; note = 2'-O-methyl ribonucleotide
  modified_base 61: mod_base = OTHER; note = 2'-O-methyl ribonucleotide
  modified_base 66: mod_base = OTHER; note = 2'-O-methyl ribonucleotide
  modified_base 67: mod_base = OTHER; note = 2'-O-methyl ribonucleotide
  modified_base 70: mod_base = OTHER; note = 2'-O-methyl ribonucleotide
  modified_base 71: mod_base = OTHER; note = 2'-O-methyl ribonucleotide
  modified_base 72: mod_base = OTHER; note = 2'-O-methyl ribonucleotide
  modified_base 74: mod_base = OTHER; note = 2'-O-methyl ribonucleotide
  modified_base 75: mod_base = OTHER; note = 2'-O-methyl ribonucleotide
  modified_base 76: mod_base = OTHER; note = 2'-O-methyl ribonucleotide
  modified_base 77: mod_base = OTHER; note = 2'-O-methyl ribonucleotide
  modified_base 78: mod_base = OTHER; note = 2'-O-methyl ribonucleotide
  modified_base 79: mod_base = OTHER; note = 2'-O-methyl ribonucleotide
  modified_base 80: mod_base = OTHER; note = 2'-O-methyl ribonucleotide
  modified_base 81: mod_base = OTHER; note = 2'-O-methyl ribonucleotide
  modified_base 83: mod_base = OTHER; note = 2'-O-methyl ribonucleotide
  modified_base 84: mod_base = OTHER; note = 2'-O-methyl ribonucleotide
  modified_base 85: mod_base = OTHER; note = 2'-O-methyl ribonucleotide
  modified_base 86: mod_base = OTHER; note = 2'-O-methyl ribonucleotide
  modified_base 87: mod_base = OTHER; note = 2'-O-methyl ribonucleotide
  modified_base 88: mod_base = OTHER; note = 2'-O-methyl ribonucleotide
  modified_base 89: mod_base = OTHER; note = 2'-O-methyl ribonucleotide
  modified_base 90: mod_base = OTHER; note = 2'-O-methyl ribonucleotide
  modified_base 91: mod_base = OTHER; note = 2'-O-methyl ribonucleotide
  modified_base 92: mod_base = OTHER; note = 2'-O-methyl ribonucleotide
  modified_base 93: mod_base = OTHER; note = 2'-O-methyl ribonucleotide
  modified_base 94: mod_base = OTHER; note = 2'-O-methyl ribonucleotide
  modified_base 95: mod_base = OTHER; note = 2'-O-methyl ribonucleotide
  modified_base 96: mod_base = OTHER; note = 2'-O-methyl ribonucleotide
  modified_base 97: mod_base = OTHER; note = 2'-O-methyl ribonucleotide
  modified_base 98: mod_base = OTHER; note = 2'-O-methyl ribonucleotide
  modified_base 99: mod_base = OTHER; note = 2'-O-methyl ribonucleotide
  modified_base 100: mod_base = OTHER; note = 2'-O-methyl ribonucleotide
  modified_base 101: mod_base = OTHER; note = uniform ribonucleotides (A, C, G, inosine or U), deoxynucleotides (A, G, C, inosine or T), ribonebularine, 2'-O-methylnebularine or deoxynebularine
  modified_base 102: mod_base = OTHER; note = uniform ribonucleotides (A, C, G, inosine or U), deoxynucleotides (A, G, C, inosine or T), ribonebularine, 2'-O-methylnebularine or deoxynebularine
  modified_base 103: mod_base = OTHER; note = uniform ribonucleotides (A, C, G, inosine or U), deoxynucleotides (A, G, C, inosine or T), ribonebularine, 2'-O-methylnebularine or deoxynebularine
  modified_base 1..4: mod_base = OTHER; note = phosphorothioate linkage
  modified_base 45..46: mod_base = OTHER; note = phosphorothioate linkage
  modified_base 97..100: mod_base = OTHER; note = phosphorothioate linkage
  misc_feature 1..100: note = RNA
  misc_feature 101..103: note = Optionally DNA or RNA

SEQ ID NO: 2823 - DNA, 103 bp, synthetic construct; identical to SEQ ID NO: 1796
  source 1..103: mol_type = other DNA
  modified_base 1: mod_base = OTHER; note = 2'-O-methyl ribonucleotide
  modified_base 2: mod_base = OTHER; note = 2'-O-methyl ribonucleotide
  modified_base 3: mod_base = OTHER; note = 2'-O-methyl ribonucleotide
  modified_base 21: mod_base = OTHER; note = 2'-O-methyl ribonucleotide
  modified_base 28: mod_base = OTHER; note = 2'-O-methyl ribonucleotide
  modified_base 29: mod_base = OTHER; note = 2'-O-methyl ribonucleotide
  modified_base 30: mod_base = OTHER; note = 2'-O-methyl ribonucleotide
  modified_base 31: mod_base = OTHER; note = 2'-O-methyl ribonucleotide
  modified_base 32: mod_base = OTHER; note = 2'-O-methyl ribonucleotide
  modified_base 33: mod_base = OTHER; note = 2'-O-methyl ribonucleotide
  modified_base 34: mod_base = OTHER; note = 2'-O-methyl ribonucleotide
  modified_base 35: mod_base = OTHER; note = 2'-O-methyl ribonucleotide
  modified_base 36: mod_base = OTHER; note = 2'-O-methyl ribonucleotide
  modified_base 37: mod_base = OTHER; note = 2'-O-methyl ribonucleotide
  modified_base 38: mod_base = OTHER; note = 2'-O-methyl ribonucleotide
  modified_base 39: mod_base = OTHER; note = 2'-O-methyl ribonucleotide
  modified_base 40: mod_base = OTHER; note = 2'-O-methyl ribonucleotide
  modified_base 41: mod_base = OTHER; note = 2'-O-methyl ribonucleotide
  modified_base 42: mod_base = OTHER; note = 2'-O-methyl ribonucleotide
  modified_base 46: mod_base = OTHER; note = 2'-O-methyl ribonucleotide
  modified_base 48: mod_base = OTHER; note = 2'-O-methyl ribonucleotide
  modified_base 50: mod_base = OTHER; note = 2'-O-methyl ribonucleotide
  modified_base 52: mod_base = OTHER; note = 2'-O-methyl ribonucleotide
  modified_base 53: mod_base = OTHER; note = 2'-O-methyl ribonucleotide
  modified_base 54: mod_base = OTHER; note = 2'-O-methyl ribonucleotide
  modified_base 55: mod_base = OTHER; note = 2'-O-methyl ribonucleotide
  modified_base 56: mod_base = OTHER; note = 2'-O-methyl ribonucleotide
  modified_base 57: mod_base = OTHER; note = 2'-O-methyl ribonucleotide
  modified_base 60: mod_base = OTHER; note = 2'-O-methyl ribonucleotide
  modified_base 61: mod_base = OTHER; note = 2'-O-methyl ribonucleotide
  modified_base 66: mod_base = OTHER; note = 2'-O-methyl ribonucleotide
  modified_base 67: mod_base = OTHER; note = 2'-O-methyl ribonucleotide
  modified_base 70: mod_base = OTHER; note = 2'-O-methyl ribonucleotide
  modified_base 71: mod_base = OTHER; note = 2'-O-methyl ribonucleotide
  modified_base 72: mod_base = OTHER; note = 2'-O-methyl ribonucleotide
  modified_base 73: mod_base = OTHER; note = 2'-O-methyl ribonucleotide
  modified_base 74: mod_base = OTHER; note = 2'-O-methyl ribonucleotide
  modified_base 75: mod_base = OTHER; note = 2'-O-methyl ribonucleotide
  modified_base 76: mod_base = OTHER; note = 2'-O-methyl ribonucleotide
  modified_base 77: mod_base = OTHER; note = 2'-O-methyl ribonucleotide
  modified_base 78: mod_base = OTHER; note = 2'-O-methyl ribonucleotide
  modified_base 79: mod_base = OTHER; note = 2'-O-methyl ribonucleotide
  modified_base 80: mod_base = OTHER; note = 2'-O-methyl ribonucleotide
  modified_base 81: mod_base = OTHER; note = 2'-O-methyl ribonucleotide
  modified_base 83: mod_base = OTHER; note = 2'-O-methyl ribonucleotide
  modified_base 84: mod_base = OTHER; note = 2'-O-methyl ribonucleotide
  modified_base 85: mod_base = OTHER; note = 2'-O-methyl ribonucleotide
  modified_base 86: mod_base = OTHER; note = 2'-O-methyl ribonucleotide
  modified_base 87: mod_base = OTHER; note = 2'-O-methyl ribonucleotide
  modified_base 88: mod_base = OTHER; note = 2'-O-methyl ribonucleotide
  modified_base 89: mod_base = OTHER; note = 2'-O-methyl ribonucleotide
  modified_base 90: mod_base = OTHER; note = 2'-O-methyl ribonucleotide
  modified_base 91: mod_base = OTHER; note = 2'-O-methyl ribonucleotide
  modified_base 92: mod_base = OTHER; note = 2'-O-methyl ribonucleotide
  modified_base 93: mod_base = OTHER; note = 2'-O-methyl ribonucleotide
  modified_base 94: mod_base = OTHER; note = 2'-O-methyl ribonucleotide
  modified_base 95: mod_base = OTHER; note = 2'-O-methyl ribonucleotide
  modified_base 96: mod_base = OTHER; note = 2'-O-methyl ribonucleotide
  modified_base 97: mod_base = OTHER; note = 2'-O-methyl ribonucleotide
  modified_base 98: mod_base = OTHER; note = 2'-O-methyl ribonucleotide
  modified_base 99: mod_base = OTHER; note = 2'-O-methyl ribonucleotide
  modified_base 100: mod_base = OTHER; note = 2'-O-methyl ribonucleotide
  modified_base 101: mod_base = OTHER; note = uniform ribonucleotides (A, C, G, inosine or U), deoxynucleotides (A, G, C, inosine or T), ribonebularine, 2'-O-methylnebularine or deoxynebularine
  modified_base 102: mod_base = OTHER; note = uniform ribonucleotides (A, C, G, inosine or U), deoxynucleotides (A, G, C, inosine or T), ribonebularine, 2'-O-methylnebularine or deoxynebularine
  modified_base 103: mod_base = OTHER; note = uniform ribonucleotides (A, C, G, inosine or U), deoxynucleotides (A, G, C, inosine or T), ribonebularine, 2'-O-methylnebularine or deoxynebularine
  modified_base 1..4: mod_base = OTHER; note = phosphorothioate linkage
  modified_base 45..46: mod_base = OTHER; note = phosphorothioate linkage
  modified_base 97..100: mod_base = OTHER; note = phosphorothioate linkage
  misc_feature 1..100: note = RNA
  misc_feature 101..103: note = Optionally DNA or RNA

SEQ ID NO: 2824 - DNA, 103 bp, synthetic construct; identical to SEQ ID NO: 1796
  source 1..103: mol_type = other DNA
  modified_base 1: mod_base = OTHER; note = 2'-O-methyl ribonucleotide
  modified_base 2: mod_base = OTHER; note = 2'-O-methyl ribonucleotide
  modified_base 3: mod_base = OTHER; note = 2'-O-methyl ribonucleotide
  modified_base 21: mod_base = OTHER; note = 2'-O-methyl ribonucleotide
  modified_base 28: mod_base = OTHER; note = 2'-O-methyl ribonucleotide
  modified_base 29: mod_base = OTHER; note = 2'-O-methyl ribonucleotide
  modified_base 30: mod_base = OTHER; note = 2'-O-methyl ribonucleotide
  modified_base 31: mod_base = OTHER; note = 2'-O-methyl ribonucleotide
  modified_base 32: mod_base = OTHER; note = 2'-O-methyl ribonucleotide
  modified_base 34: mod_base = OTHER; note = 2'-O-methyl ribonucleotide
  modified_base 35: mod_base = OTHER; note = 2'-O-methyl ribonucleotide
  modified_base 36: mod_base = OTHER; note = 2'-O-methyl ribonucleotide
  modified_base 37: mod_base = OTHER; note = 2'-O-methyl ribonucleotide
  modified_base 38: mod_base = OTHER; note = 2'-O-methyl ribonucleotide
  modified_base 39: mod_base = OTHER; note = 2'-O-methyl ribonucleotide
  modified_base 40: mod_base = OTHER; note = 2'-O-methyl ribonucleotide
  modified_base 41: mod_base = OTHER; note = 2'-O-methyl ribonucleotide
  modified_base 42: mod_base = OTHER; note = 2'-O-methyl ribonucleotide
  modified_base 46: mod_base = OTHER; note = 2'-O-methyl ribonucleotide
  modified_base 48: mod_base = OTHER; note = 2'-O-methyl ribonucleotide
  modified_base 50: mod_base = OTHER; note = 2'-O-methyl ribonucleotide
  modified_base 52: mod_base = OTHER; note = 2'-O-methyl ribonucleotide
  modified_base 53: mod_base = OTHER; note = 2'-O-methyl ribonucleotide
  modified_base 54: mod_base = OTHER; note = 2'-O-methyl ribonucleotide
  modified_base 55: mod_base = OTHER; note = 2'-O-methyl ribonucleotide
  modified_base 56: mod_base = OTHER; note = 2'-O-methyl ribonucleotide
  modified_base 57: mod_base = OTHER; note = 2'-O-methyl ribonucleotide
  modified_base 60: mod_base = OTHER; note = 2'-O-methyl ribonucleotide
  modified_base 61: mod_base = OTHER; note = 2'-O-methyl ribonucleotide
  modified_base 66: mod_base = OTHER; note = 2'-O-methyl ribonucleotide
  modified_base 67: mod_base = OTHER; note = 2'-O-methyl ribonucleotide
  modified_base 70: mod_base = OTHER; note = 2'-O-methyl ribonucleotide
  modified_base 71: mod_base = OTHER; note = 2'-O-methyl ribonucleotide
  modified_base 72: mod_base = OTHER; note = 2'-O-methyl ribonucleotide
  modified_base 74: mod_base = OTHER; note = 2'-O-methyl ribonucleotide
  modified_base 75: mod_base = OTHER; note = 2'-O-methyl ribonucleotide
  modified_base 76: mod_base = OTHER; note = 2'-O-methyl ribonucleotide
  modified_base 77: mod_base = OTHER; note = 2'-O-methyl ribonucleotide
  modified_base 78: mod_base = OTHER; note = 2'-O-methyl ribonucleotide
  modified_base 79: mod_base = OTHER; note = 2'-O-methyl ribonucleotide
  modified_base 80: mod_base = OTHER; note = 2'-O-methyl ribonucleotide
  modified_base 81: mod_base = OTHER; note = 2'-O-methyl ribonucleotide
  modified_base 83: mod_base = OTHER; note = 2'-O-methyl ribonucleotide
  modified_base 84: mod_base = OTHER; note = 2'-O-methyl ribonucleotide
  modified_base 85: mod_base = OTHER; note = 2'-O-methyl ribonucleotide
  modified_base 86: mod_base = OTHER; note = 2'-O-methyl ribonucleotide
  modified_base 87: mod_base = OTHER; note = 2'-O-methyl ribonucleotide
  modified_base 88: mod_base = OTHER; note = 2'-O-methyl ribonucleotide
  modified_base 89: mod_base = OTHER; note = 2'-O-methyl ribonucleotide
  modified_base 90: mod_base = OTHER; note = 2'-O-methyl ribonucleotide
  modified_base 91: mod_base = OTHER; note = 2'-O-methyl ribonucleotide
  modified_base 92: mod_base = OTHER; note = 2'-O-methyl ribonucleotide
  modified_base 93: mod_base = OTHER; note = 2'-O-methyl ribonucleotide
  modified_base 94: mod_base = OTHER; note = 2'-O-methyl ribonucleotide
  modified_base 95: mod_base = OTHER; note = 2'-O-methyl ribonucleotide
  modified_base 96: mod_base = OTHER; note = 2'-O-methyl ribonucleotide
  modified_base 97: mod_base = OTHER; note = 2'-O-methyl ribonucleotide
  modified_base 98: mod_base = OTHER; note = 2'-O-methyl ribonucleotide
  modified_base 99: mod_base = OTHER; note = 2'-O-methyl ribonucleotide
  modified_base 100: mod_base = OTHER; note = 2'-O-methyl ribonucleotide
  modified_base 101: mod_base = OTHER; note = uniform ribonucleotides (A, C, G, inosine or U), deoxynucleotides (A, G, C, inosine or T), ribonebularine, 2'-O-methylnebularine or deoxynebularine
  modified_base 102: mod_base = OTHER; note = uniform ribonucleotides (A, C, G, inosine or U), deoxynucleotides (A, G, C, inosine or T), ribonebularine, 2'-O-methylnebularine or deoxynebularine
  modified_base 103: mod_base = OTHER; note = uniform ribonucleotides (A, C, G, inosine or U), deoxynucleotides (A, G, C, inosine or T), ribonebularine, 2'-O-methylnebularine or deoxynebularine
  modified_base 1..4: mod_base = OTHER; note = phosphorothioate linkage
  modified_base 45..46: mod_base = OTHER; note = phosphorothioate linkage
  modified_base 97..100: mod_base = OTHER; note = phosphorothioate linkage
  misc_feature 1..100: note = RNA
  misc_feature 101..103: note = Optionally DNA or RNA

SEQ ID NO: 2825 - DNA, 103 bp, synthetic construct; identical to SEQ ID NO: 1797
  source 1..103: mol_type = other DNA
  modified_base 1: mod_base = OTHER; note = 2'-O-methyl ribonucleotide
  modified_base 2: mod_base = OTHER; note = 2'-O-methyl ribonucleotide
  modified_base 3: mod_base = OTHER; note = 2'-O-methyl ribonucleotide
  modified_base 21: mod_base = OTHER; note = 2'-O-methyl ribonucleotide
  modified_base 28: mod_base = OTHER; note = 2'-O-methyl ribonucleotide
  modified_base 29: mod_base = OTHER; note = 2'-O-methyl ribonucleotide
  modified_base 30: mod_base = OTHER; note = 2'-O-methyl ribonucleotide
  modified_base 31: mod_base = OTHER; note = 2'-O-methyl ribonucleotide
  modified_base 32: mod_base = OTHER; note = 2'-O-methyl ribonucleotide
  modified_base 33: mod_base = OTHER; note = 2'-O-methyl ribonucleotide
  modified_base 34: mod_base = OTHER; note = 2'-O-methyl ribonucleotide
  modified_base 35: mod_base = OTHER; note = 2'-O-methyl ribonucleotide
  modified_base 36: mod_base = OTHER; note = 2'-O-methyl ribonucleotide
  modified_base 37: mod_base = OTHER; note = 2'-O-methyl ribonucleotide
  modified_base 38: mod_base = OTHER; note = 2'-O-methyl ribonucleotide
  modified_base 39: mod_base = OTHER; note = 2'-O-methyl ribonucleotide
  modified_base 40: mod_base = OTHER; note = 2'-O-methyl ribonucleotide
  modified_base 41: mod_base = OTHER; note = 2'-O-methyl ribonucleotide
  modified_base 42: mod_base = OTHER; note = 2'-O-methyl ribonucleotide
  modified_base 46: mod_base = OTHER; note = 2'-O-methyl ribonucleotide
  modified_base 48: mod_base = OTHER; note = 2'-O-methyl ribonucleotide
  modified_base 50: mod_base = OTHER; note = 2'-O-methyl ribonucleotide
  modified_base 52: mod_base = OTHER; note = 2'-O-methyl ribonucleotide
  modified_base 53: mod_base = OTHER; note = 2'-O-methyl ribonucleotide
  modified_base 54: mod_base = OTHER; note = 2'-O-methyl ribonucleotide
  modified_base 57: mod_base = OTHER; note = 2'-O-methyl ribonucleotide
  modified_base 61: mod_base = OTHER; note = 2'-O-methyl ribonucleotide
  modified_base 66: mod_base = OTHER; note = 2'-O-methyl ribonucleotide
  modified_base 67: mod_base = OTHER; note = 2'-O-methyl ribonucleotide
  modified_base 70: mod_base = OTHER; note = 2'-O-methyl ribonucleotide
  modified_base 71: mod_base = OTHER; note = 2'-O-methyl ribonucleotide
  modified_base 72: mod_base = OTHER; note = 2'-O-methyl ribonucleotide
  modified_base 74: mod_base = OTHER; note = 2'-O-methyl ribonucleotide
  modified_base 75: mod_base = OTHER; note = 2'-O-methyl ribonucleotide
  modified_base 76: mod_base = OTHER; note = 2'-O-methyl ribonucleotide
  modified_base 77: mod_base = OTHER; note = 2'-O-methyl ribonucleotide
  modified_base 78: mod_base = OTHER; note = 2'-O-methyl ribonucleotide
  modified_base 79: mod_base = OTHER; note = 2'-O-methyl ribonucleotide
  modified_base 80: mod_base = OTHER; note = 2'-O-methyl ribonucleotide
  modified_base 82: mod_base = OTHER; note = 2'-O-methyl ribonucleotide
  modified_base 83: mod_base = OTHER; note = 2'-O-methyl ribonucleotide
  modified_base 84: mod_base = OTHER; note = 2'-O-methyl ribonucleotide
  modified_base 85: mod_base = OTHER; note = 2'-O-methyl ribonucleotide
  modified_base 86: mod_base = OTHER; note = 2'-O-methyl ribonucleotide
  modified_base 87: mod_base = OTHER; note = 2'-O-methyl ribonucleotide
  modified_base 89: mod_base = OTHER; note = 2'-O-methyl ribonucleotide
  modified_base 92: mod_base = OTHER; note = 2'-O-methyl ribonucleotide
  modified_base 93: mod_base = OTHER; note = 2'-O-methyl ribonucleotide
  modified_base 94: mod_base = OTHER; note = 2'-O-methyl ribonucleotide
  modified_base 95: mod_base = OTHER; note = 2'-O-methyl ribonucleotide
  modified_base 96: mod_base = OTHER; note = 2'-O-methyl ribonucleotide
  modified_base 97: mod_base = OTHER; note = 2'-O-methyl ribonucleotide
  modified_base 98: mod_base = OTHER; note = 2'-O-methyl ribonucleotide
  modified_base 99: mod_base = OTHER; note = 2'-O-methyl ribonucleotide
  modified_base 100: mod_base = OTHER; note = 2'-O-methyl ribonucleotide
  modified_base 101: mod_base = OTHER; note = uniform ribonucleotides (A, C, G, inosine or U), deoxynucleotides (A, G, C, inosine or T), ribonebularine, 2'-O-methylnebularine or deoxynebularine
  modified_base 102: mod_base = OTHER; note = uniform ribonucleotides (A, C, G, inosine or U), deoxynucleotides (A, G, C, inosine or T), ribonebularine, 2'-O-methylnebularine or deoxynebularine
  modified_base 103: mod_base = OTHER; note = uniform ribonucleotides (A, C, G, inosine or U), deoxynucleotides (A, G, C, inosine or T), ribonebularine, 2'-O-methylnebularine or deoxynebularine
  modified_base 1..4: mod_base = OTHER; note = phosphorothioate linkage
  modified_base 45..46: mod_base = OTHER; note = phosphorothioate linkage
  modified_base 97..100: mod_base = OTHER; note = phosphorothioate linkage
  misc_feature 1..100: note = RNA
  misc_feature 101..103: note = Optionally DNA or RNA

SEQ ID NO: 2826 - DNA, 103 bp, synthetic construct; identical to SEQ ID NO: 1797
  source 1..103: mol_type = other DNA
  modified_base 1: mod_base = OTHER; note = 2'-O-methyl ribonucleotide
  modified_base 2: mod_base = OTHER; note = 2'-O-methyl ribonucleotide
  modified_base 3: mod_base = OTHER; note = 2'-O-methyl ribonucleotide
  modified_base 21: mod_base = OTHER; note = 2'-O-methyl ribonucleotide
  modified_base 28: mod_base = OTHER; note = 2'-O-methyl ribonucleotide
  modified_base 29: mod_base = OTHER; note = 2'-O-methyl ribonucleotide
  modified_base 30: mod_base = OTHER; note = 2'-O-methyl ribonucleotide
  modified_base 31: mod_base = OTHER; note = 2'-O-methyl ribonucleotide
  modified_base 32: mod_base = OTHER; note = 2'-O-methyl ribonucleotide
  modified_base 33: mod_base = OTHER; note = 2'-O-methyl ribonucleotide
  modified_base 34: mod_base = OTHER; note = 2'-O-methyl ribonucleotide
  modified_base 35: mod_base = OTHER; note = 2'-O-methyl ribonucleotide
  modified_base 36: mod_base = OTHER; note = 2'-O-methyl ribonucleotide
  modified_base 37: mod_base = OTHER; note = 2'-O-methyl ribonucleotide
  modified_base 38: mod_base = OTHER; note = 2'-O-methyl ribonucleotide
  modified_base 39: mod_base = OTHER; note = 2'-O-methyl ribonucleotide
  modified_base 40: mod_base = OTHER; note = 2'-O-methyl ribonucleotide
  modified_base 41: mod_base = OTHER; note = 2'-O-methyl ribonucleotide
  modified_base 42: mod_base = OTHER; note = 2'-O-methyl ribonucleotide
  modified_base 46: mod_base = OTHER; note = 2'-O-methyl ribonucleotide
  modified_base 48: mod_base = OTHER; note = 2'-O-methyl ribonucleotide
  modified_base 50: mod_base = OTHER; note = 2'-O-methyl ribonucleotide
  modified_base 52: mod_base = OTHER; note = 2'-O-methyl ribonucleotide
  modified_base 53: mod_base = OTHER; note = 2'-O-methyl ribonucleotide
  modified_base 54: mod_base = OTHER; note = 2'-O-methyl ribonucleotide
  modified_base 55: mod_base = OTHER; note = 2'-O-methyl ribonucleotide
  modified_base 56: mod_base = OTHER; note = 2'-O-methyl ribonucleotide
  modified_base 57: mod_base = OTHER; note = 2'-O-methyl ribonucleotide
  modified_base 60: mod_base = OTHER; note = 2'-O-methyl ribonucleotide
  modified_base 61: mod_base = OTHER; note = 2'-O-methyl ribonucleotide
  modified_base 66: mod_base = OTHER; note = 2'-O-methyl ribonucleotide
  modified_base 67: mod_base = OTHER; note = 2'-O-methyl ribonucleotide
  modified_base 70: mod_base = OTHER; note = 2'-O-methyl ribonucleotide
  modified_base 71: mod_base = OTHER; note = 2'-O-methyl ribonucleotide
  modified_base 72: mod_base = OTHER; note = 2'-O-methyl ribonucleotide
  modified_base 74: mod_base = OTHER; note = 2'-O-methyl ribonucleotide
  modified_base 75: mod_base = OTHER; note = 2'-O-methyl ribonucleotide
  modified_base 76: mod_base = OTHER; note = 2'-O-methyl ribonucleotide
  modified_base 77: mod_base = OTHER; note = 2'-O-methyl ribonucleotide
  modified_base 78: mod_base = OTHER; note = 2'-O-methyl ribonucleotide
  modified_base 79: mod_base = OTHER; note = 2'-O-methyl ribonucleotide
  modified_base 80: mod_base = OTHER; note = 2'-O-methyl ribonucleotide
  modified_base 82: mod_base = OTHER; note = 2'-O-methyl ribonucleotide
  modified_base 83: mod_base = OTHER; note = 2'-O-methyl ribonucleotide
  modified_base 84: mod_base = OTHER; note = 2'-O-methyl ribonucleotide
  modified_base 85: mod_base = OTHER; note = 2'-O-methyl ribonucleotide
  modified_base 86: mod_base = OTHER; note = 2'-O-methyl ribonucleotide
  modified_base 87: mod_base = OTHER; note = 2'-O-methyl ribonucleotide
  modified_base 89: mod_base = OTHER; note = 2'-O-methyl ribonucleotide
  modified_base 92: mod_base = OTHER; note = 2'-O-methyl ribonucleotide
  modified_base 93: mod_base = OTHER; note = 2'-O-methyl ribonucleotide
  modified_base 94: mod_base = OTHER; note = 2'-O-methyl ribonucleotide
  modified_base 95: mod_base = OTHER; note = 2'-O-methyl ribonucleotide
  modified_base 96: mod_base = OTHER; note = 2'-O-methyl ribonucleotide
  modified_base 97: mod_base = OTHER; note = 2'-O-methyl ribonucleotide
  modified_base 98: mod_base = OTHER; note = 2'-O-methyl ribonucleotide
  modified_base 99: mod_base = OTHER; note = 2'-O-methyl ribonucleotide
  modified_base 100: mod_base = OTHER; note = 2'-O-methyl ribonucleotide
  modified_base 101: mod_base = OTHER; note = uniform ribonucleotides (A, C, G, inosine or U), deoxynucleotides (A, G, C, inosine or T), ribonebularine, 2'-O-methylnebularine or deoxynebularine
  modified_base 102: mod_base = OTHER; note = uniform ribonucleotides (A, C, G, inosine or U), deoxynucleotides (A, G, C, inosine or T), ribonebularine, 2'-O-methylnebularine or deoxynebularine
  modified_base 103: mod_base = OTHER; note = uniform ribonucleotides (A, C, G, inosine or U), deoxynucleotides (A, G, C, inosine or T), ribonebularine, 2'-O-methylnebularine or deoxynebularine
  modified_base 1..4: mod_base = OTHER; note = phosphorothioate linkage
  modified_base 45..46: mod_base = OTHER; note = phosphorothioate linkage
  modified_base 97..100: mod_base = OTHER; note = phosphorothioate linkage
  misc_feature 1..100: note = RNA
  misc_feature 101..103: note = Optionally DNA or RNA

SEQ ID NO: 2827 - DNA, 103 bp, synthetic construct; identical to SEQ ID NO: 1797
  source 1..103: mol_type = other DNA
  modified_base 1: mod_base = OTHER; note = 2'-O-methyl ribonucleotide
  modified_base 2: mod_base = OTHER; note = 2'-O-methyl ribonucleotide
  modified_base 3: mod_base = OTHER; note = 2'-O-methyl ribonucleotide
  modified_base 21: mod_base = OTHER; note = 2'-O-methyl ribonucleotide
  modified_base 28: mod_base = OTHER; note = 2'-O-methyl ribonucleotide
  modified_base 29: mod_base = OTHER; note = 2'-O-methyl ribonucleotide
  modified_base 30: mod_base = OTHER; note = 2'-O-methyl ribonucleotide
  modified_base 31: mod_base = OTHER; note = 2'-O-methyl ribonucleotide
  modified_base 32: mod_base = OTHER; note = 2'-O-methyl ribonucleotide
  modified_base 33: mod_base = OTHER; note = 2'-O-methyl ribonucleotide
  modified_base 34: mod_base = OTHER; note = 2'-O-methyl ribonucleotide
  modified_base 35: mod_base = OTHER; note = 2'-O-methyl ribonucleotide
  modified_base 36: mod_base = OTHER; note = 2'-O-methyl ribonucleotide
  modified_base 37: mod_base = OTHER; note = 2'-O-methyl ribonucleotide
  modified_base 38: mod_base = OTHER; note = 2'-O-methyl ribonucleotide
  modified_base 39: mod_base = OTHER; note = 2'-O-methyl ribonucleotide
  modified_base 40: mod_base = OTHER; note = 2'-O-methyl ribonucleotide
  modified_base 41: mod_base = OTHER; note = 2'-O-methyl ribonucleotide
  modified_base 42: mod_base = OTHER; note = 2'-O-methyl ribonucleotide
  modified_base 46: mod_base = OTHER; note = 2'-O-methyl ribonucleotide
  modified_base 48: mod_base = OTHER; note = 2'-O-methyl ribonucleotide
  modified_base 50: mod_base = OTHER; note = 2'-O-methyl ribonucleotide
  modified_base 52: mod_base = OTHER; note = 2'-O-methyl ribonucleotide
  modified_base 53: mod_base = OTHER; note = 2'-O-methyl ribonucleotide
  modified_base 54: mod_base = OTHER; note = 2'-O-methyl ribonucleotide
  modified_base 57: mod_base = OTHER; note = 2'-O-methyl ribonucleotide
  modified_base 61: mod_base = OTHER; note = 2'-O-methyl ribonucleotide
  modified_base 66: mod_base = OTHER; note = 2'-O-methyl ribonucleotide
  modified_base 67: mod_base = OTHER; note = 2'-O-methyl ribonucleotide
  modified_base 70: mod_base = OTHER; note = 2'-O-methyl ribonucleotide
  modified_base 71: mod_base = OTHER; note = 2'-O-methyl ribonucleotide
  modified_base 72: mod_base = OTHER; note = 2'-O-methyl ribonucleotide
  modified_base 73: mod_base = OTHER; note = 2'-O-methyl ribonucleotide
  modified_base 74: mod_base = OTHER; note = 2'-O-methyl ribonucleotide
  modified_base 75: mod_base = OTHER; note = 2'-O-methyl ribonucleotide
  modified_base 76: mod_base = OTHER; note = 2'-O-methyl ribonucleotide
  modified_base 77: mod_base = OTHER; note = 2'-O-methyl ribonucleotide
  modified_base 78: mod_base = OTHER; note = 2'-O-methyl ribonucleotide
  modified_base 79: mod_base = OTHER; note = 2'-O-methyl ribonucleotide
  modified_base 80: mod_base = OTHER; note = 2'-O-methyl ribonucleotide
  modified_base 82: mod_base = OTHER; note = 2'-O-methyl ribonucleotide
  modified_base 83: mod_base = OTHER; note = 2'-O-methyl ribonucleotide
  modified_base 84: mod_base = OTHER; note = 2'-O-methyl ribonucleotide
  modified_base 85: mod_base = OTHER; note = 2'-O-methyl ribonucleotide
  modified_base 86: mod_base = OTHER; note = 2'-O-methyl ribonucleotide
  modified_base 87: mod_base = OTHER; note = 2'-O-methyl ribonucleotide
  modified_base 89: mod_base = OTHER; note = 2'-O-methyl ribonucleotide
  modified_base 92: mod_base = OTHER; note = 2'-O-methyl ribonucleotide
  modified_base 93: mod_base = OTHER; note = 2'-O-methyl ribonucleotide
  modified_base 94: mod_base = OTHER; note = 2'-O-methyl ribonucleotide
  modified_base 95: mod_base = OTHER; note = 2'-O-methyl ribonucleotide
  modified_base 96: mod_base = OTHER; note = 2'-O-methyl ribonucleotide
  modified_base 97: mod_base = OTHER; note = 2'-O-methyl ribonucleotide
  modified_base 98: mod_base = OTHER; note = 2'-O-methyl ribonucleotide
  modified_base 99: mod_base = OTHER; note = 2'-O-methyl ribonucleotide
  modified_base 100: mod_base = OTHER; note = 2'-O-methyl ribonucleotide
  modified_base 101: mod_base = OTHER; note = uniform ribonucleotides (A, C, G, inosine or U), deoxynucleotides (A, G, C, inosine or T), ribonebularine, 2'-O-methylnebularine or deoxynebularine
  modified_base 102: mod_base = OTHER; note = uniform ribonucleotides (A, C, G, inosine or U), deoxynucleotides (A, G, C, inosine or T), ribonebularine, 2'-O-methylnebularine or deoxynebularine
  modified_base 103: mod_base = OTHER; note = uniform ribonucleotides (A, C, G, inosine or U), deoxynucleotides (A, G, C, inosine or T), ribonebularine, 2'-O-methylnebularine or deoxynebularine
  modified_base 1..4: mod_base = OTHER; note = phosphorothioate linkage
  modified_base 45..46: mod_base = OTHER; note = phosphorothioate linkage
  modified_base 97..100: mod_base = OTHER; note = phosphorothioate linkage
  misc_feature 1..100: note = RNA
  misc_feature 101..103: note = Optionally DNA or RNA

SEQ ID NO: 2828 - DNA, 103 bp, synthetic construct; identical to SEQ ID NO: 1797
  source 1..103: mol_type = other DNA
  modified_base 1: mod_base = OTHER; note = 2'-O-methyl ribonucleotide
  modified_base 2: mod_base = OTHER; note = 2'-O-methyl ribonucleotide
  modified_base 3: mod_base = OTHER; note = 2'-O-methyl ribonucleotide
  modified_base 21: mod_base = OTHER; note = 2'-O-methyl ribonucleotide
  modified_base 28: mod_base = OTHER; note = 2'-O-methyl ribonucleotide
  modified_base 29: mod_base = OTHER; note = 2'-O-methyl ribonucleotide
  modified_base 30: mod_base = OTHER; note = 2'-O-methyl ribonucleotide
  modified_base 31: mod_base = OTHER; note = 2'-O-methyl ribonucleotide
  modified_base 32: mod_base = OTHER; note = 2'-O-methyl ribonucleotide
  modified_base 33: mod_base = OTHER; note = 2'-O-methyl ribonucleotide
  modified_base 34: mod_base = OTHER; note = 2'-O-methyl ribonucleotide
  modified_base 35: mod_base = OTHER; note = 2'-O-methyl ribonucleotide
  modified_base 36: mod_base = OTHER; note = 2'-O-methyl ribonucleotide
  modified_base 37: mod_base = OTHER; note = 2'-O-methyl ribonucleotide
  modified_base 38: mod_base = OTHER; note = 2'-O-methyl ribonucleotide
  modified_base 39: mod_base = OTHER; note = 2'-O-methyl ribonucleotide
  modified_base 40: mod_base = OTHER; note = 2'-O-methyl ribonucleotide
  modified_base 41: mod_base = OTHER; note = 2'-O-methyl ribonucleotide
  modified_base 42: mod_base = OTHER; note = 2'-O-methyl ribonucleotide
  modified_base 46: mod_base = OTHER; note = 2'-O-methyl ribonucleotide
  modified_base 48: mod_base = OTHER; note = 2'-O-methyl ribonucleotide
  modified_base 50: mod_base = OTHER; note = 2'-O-methyl ribonucleotide
  modified_base 52: mod_base = OTHER; note = 2'-O-methyl ribonucleotide
  modified_base 53: mod_base = OTHER; note = 2'-O-methyl ribonucleotide
  modified_base 54: mod_base = OTHER; note = 2'-O-methyl ribonucleotide
  modified_base 57: mod_base = OTHER; note = 2'-O-methyl ribonucleotide
  modified_base 61: mod_base = OTHER; note = 2'-O-methyl ribonucleotide
  modified_base 66: mod_base = OTHER; note = 2'-O-methyl ribonucleotide
  modified_base 67: mod_base = OTHER; note = 2'-O-methyl ribonucleotide
  modified_base 70: mod_base = OTHER; note = 2'-O-methyl ribonucleotide
  modified_base 71: mod_base = OTHER; note = 2'-O-methyl ribonucleotide
  modified_base 72: mod_base = OTHER; note = 2'-O-methyl ribonucleotide
  modified_base 73: mod_base = OTHER; note = 2'-O-methyl ribonucleotide
  modified_base 74: mod_base = OTHER; note = 2'-O-methyl ribonucleotide
  modified_base 75: mod_base = OTHER; note = 2'-O-methyl ribonucleotide
  modified_base 76: mod_base = OTHER; note = 2'-O-methyl ribonucleotide
  modified_base 77: mod_base = OTHER; note = 2'-O-methyl ribonucleotide
  modified_base 78: mod_base = OTHER; note = 2'-O-methyl ribonucleotide
  modified_base 79: mod_base = OTHER; note = 2'-O-methyl ribonucleotide
  modified_base 80: mod_base = OTHER; note = 2'-O-methyl ribonucleotide
  modified_base 82: mod_base = OTHER; note = 2'-O-methyl ribonucleotide
  modified_base 83: mod_base = OTHER; note = 2'-O-methyl ribonucleotide
  modified_base 84: mod_base = OTHER; note = 2'-O-methyl ribonucleotide
  modified_base 85: mod_base = OTHER; note = 2'-O-methyl ribonucleotide
  modified_base 86: mod_base = OTHER; note = 2'-O-methyl ribonucleotide
  modified_base 87: mod_base = OTHER; note = 2'-O-methyl ribonucleotide
  modified_base 89: mod_base = OTHER; note = 2'-O-methyl ribonucleotide
  modified_base 91: mod_base = OTHER; note = 2'-O-methyl ribonucleotide
  modified_base 92: mod_base = OTHER; note = 2'-O-methyl ribonucleotide
  modified_base 93: mod_base = OTHER; note = 2'-O-methyl ribonucleotide
  modified_base 94: mod_base = OTHER; note = 2'-O-methyl ribonucleotide
  modified_base 95: mod_base = OTHER; note = 2'-O-methyl ribonucleotide
  modified_base 96: mod_base = OTHER; note = 2'-O-methyl ribonucleotide
  modified_base 97: mod_base = OTHER; note = 2'-O-methyl ribonucleotide
  modified_base 98: mod_base = OTHER; note = 2'-O-methyl ribonucleotide
  modified_base 99: mod_base = OTHER; note = 2'-O-methyl ribonucleotide
  modified_base 100: mod_base = OTHER; note = 2'-O-methyl ribonucleotide
  modified_base 101: mod_base = OTHER; note = uniform ribonucleotides (A, C, G, inosine or U), deoxynucleotides (A, G, C, inosine or T), ribonebularine, 2'-O-methylnebularine or deoxynebularine
  modified_base 102: mod_base = OTHER; note = uniform ribonucleotides (A, C, G, inosine or U), deoxynucleotides (A, G, C, inosine or T), ribonebularine, 2'-O-methylnebularine or deoxynebularine
  modified_base 103: mod_base = OTHER; note = uniform ribonucleotides (A, C, G, inosine or U), deoxynucleotides (A, G, C, inosine or T), ribonebularine, 2'-O-methylnebularine or deoxynebularine
  modified_base 1..4: mod_base = OTHER; note = phosphorothioate linkage
  modified_base 45..46: mod_base = OTHER; note = phosphorothioate linkage
  modified_base 97..100: mod_base = OTHER; note = phosphorothioate linkage
  misc_feature 1..100: note = RNA
  misc_feature 101..103: note = Optionally DNA or RNA

SEQ ID NO: 2829 - DNA, 103 bp, synthetic construct; identical to SEQ ID NO: 1797
  source 1..103: mol_type = other DNA
  modified_base 1: mod_base = OTHER; note = 2'-O-methyl ribonucleotide
  modified_base 2: mod_base = OTHER; note = 2'-O-methyl ribonucleotide
  modified_base 3: mod_base = OTHER; note = 2'-O-methyl ribonucleotide
  modified_base 21: mod_base = OTHER; note = 2'-O-methyl ribonucleotide
  modified_base 28: mod_base = OTHER; note = 2'-O-methyl ribonucleotide
  modified_base 29: mod_base = OTHER; note = 2'-O-methyl ribonucleotide
  modified_base 30: mod_base = OTHER; note = 2'-O-methyl ribonucleotide
  modified_base 31: mod_base = OTHER; note = 2'-O-methyl ribonucleotide
  modified_base 32: mod_base = OTHER; note = 2'-O-methyl ribonucleotide
  modified_base 34: mod_base = OTHER; note = 2'-O-methyl ribonucleotide
  modified_base 35: mod_base = OTHER; note = 2'-O-methyl ribonucleotide
  modified_base 36: mod_base = OTHER; note = 2'-O-methyl ribonucleotide
  modified_base 37: mod_base = OTHER; note = 2'-O-methyl ribonucleotide
  modified_base 38: mod_base = OTHER; note = 2'-O-methyl ribonucleotide
  modified_base 39: mod_base = OTHER; note = 2'-O-methyl ribonucleotide
  modified_base 40: mod_base = OTHER; note = 2'-O-methyl ribonucleotide
  modified_base 41: mod_base = OTHER; note = 2'-O-methyl ribonucleotide
  modified_base 42: mod_base = OTHER; note = 2'-O-methyl ribonucleotide
  modified_base 46: mod_base = OTHER; note = 2'-O-methyl ribonucleotide
  modified_base 48: mod_base = OTHER; note = 2'-O-methyl ribonucleotide
  modified_base 50: mod_base = OTHER; note = 2'-O-methyl ribonucleotide
  modified_base 52: mod_base = OTHER; note = 2'-O-methyl ribonucleotide
  modified_base 53: mod_base = OTHER; note = 2'-O-methyl ribonucleotide
  modified_base 54: mod_base = OTHER; note = 2'-O-methyl ribonucleotide
  modified_base 57: mod_base = OTHER; note = 2'-O-methyl ribonucleotide
  modified_base 61: mod_base = OTHER; note = 2'-O-methyl ribonucleotide
  modified_base 66: mod_base = OTHER; note = 2'-O-methyl ribonucleotide
  modified_base 67: mod_base = OTHER; note = 2'-O-methyl ribonucleotide
  modified_base 70: mod_base = OTHER; note = 2'-O-methyl ribonucleotide
  modified_base 71: mod_base = OTHER; note = 2'-O-methyl ribonucleotide
  modified_base 72: mod_base = OTHER; note = 2'-O-methyl ribonucleotide
  modified_base 73: mod_base = OTHER; note = 2'-O-methyl ribonucleotide
  modified_base 74: mod_base = OTHER; note = 2'-O-methyl ribonucleotide
  modified_base 75: mod_base = OTHER; note = 2'-O-methyl ribonucleotide
  modified_base 76: mod_base = OTHER; note = 2'-O-methyl ribonucleotide
  modified_base 77: mod_base = OTHER; note = 2'-O-methyl ribonucleotide
  modified_base 78: mod_base = OTHER; note = 2'-O-methyl ribonucleotide
  modified_base 79: mod_base = OTHER; note = 2'-O-methyl ribonucleotide
  modified_base 80: mod_base = OTHER; note = 2'-O-methyl ribonucleotide
  modified_base 82: mod_base = OTHER; note = 2'-O-methyl ribonucleotide
  modified_base 83: mod_base = OTHER; note = 2'-O-methyl ribonucleotide
  modified_base 84: mod_base = OTHER; note = 2'-O-methyl ribonucleotide
  modified_base 85: mod_base = OTHER; note = 2'-O-methyl ribonucleotide
  modified_base 86: mod_base = OTHER; note = 2'-O-methyl ribonucleotide
  modified_base 87: mod_base = OTHER; note = 2'-O-methyl ribonucleotide
  modified_base 89: mod_base = OTHER; note = 2'-O-methyl ribonucleotide
  modified_base 92: mod_base = OTHER; note = 2'-O-methyl ribonucleotide
  modified_base 93: mod_base = OTHER; note = 2'-O-methyl ribonucleotide
  modified_base 94: mod_base = OTHER; note = 2'-O-methyl ribonucleotide
  modified_base 95: mod_base = OTHER; note = 2'-O-methyl ribonucleotide
  modified_base 96: mod_base = OTHER; note = 2'-O-methyl ribonucleotide
  modified_base 97: mod_base = OTHER; note = 2'-O-methyl ribonucleotide
  modified_base 98: mod_base = OTHER; note = 2'-O-methyl ribonucleotide
  modified_base 99: mod_base = OTHER; note = 2'-O-methyl ribonucleotide
  modified_base 100: mod_base = OTHER; note = 2'-O-methyl ribonucleotide
  modified_base 101: mod_base = OTHER; note = uniform ribonucleotides (A, C, G, inosine or U), deoxynucleotides (A, G, C, inosine or T), ribonebularine, 2'-O-methylnebularine or deoxynebularine
  modified_base 102: mod_base = OTHER; note = uniform ribonucleotides (A, C, G, inosine or U), deoxynucleotides (A, G, C, inosine or T), ribonebularine, 2'-O-methylnebularine or deoxynebularine
  modified_base 103: mod_base = OTHER; note = uniform ribonucleotides (A, C, G, inosine or U), deoxynucleotides (A, G, C, inosine or T), ribonebularine, 2'-O-methylnebularine or deoxynebularine
  modified_base 1..4: mod_base = OTHER; note = phosphorothioate linkage
  modified_base 45..46: mod_base = OTHER; note = phosphorothioate linkage
  modified_base 97..100: mod_base = OTHER; note = phosphorothioate linkage
  misc_feature 1..100: note = RNA
  misc_feature 101..103: note = Optionally DNA or RNA

SEQ ID NO: 2830 - DNA, 103 bp, synthetic construct; identical to SEQ ID NO: 1797
  source 1..103: mol_type = other DNA
  modified_base 1: mod_base = OTHER; note = 2'-O-methyl ribonucleotide
  modified_base 2: mod_base = OTHER; note = 2'-O-methyl ribonucleotide
  modified_base 3: mod_base = OTHER; note = 2'-O-methyl ribonucleotide
  modified_base 21: mod_base = OTHER; note = 2'-O-methyl ribonucleotide
  modified_base 28: mod_base = OTHER; note = 2'-O-methyl ribonucleotide
  modified_base 29: mod_base = OTHER; note = 2'-O-methyl ribonucleotide
  modified_base 30: mod_base = OTHER; note = 2'-O-methyl ribonucleotide
  modified_base 31: mod_base = OTHER; note = 2'-O-methyl ribonucleotide
  modified_base 32: mod_base = OTHER; note = 2'-O-methyl ribonucleotide
  modified_base 34: mod_base = OTHER; note = 2'-O-methyl ribonucleotide
  modified_base 35: mod_base = OTHER; note = 2'-O-methyl ribonucleotide
  modified_base 36: mod_base = OTHER; note = 2'-O-methyl ribonucleotide
  modified_base 37: mod_base = OTHER; note = 2'-O-methyl ribonucleotide
  modified_base 38: mod_base = OTHER; note = 2'-O-methyl ribonucleotide
  modified_base 39: mod_base = OTHER; note = 2'-O-methyl ribonucleotide
  modified_base 40: mod_base = OTHER; note = 2'-O-methyl ribonucleotide
  modified_base 41: mod_base = OTHER; note = 2'-O-methyl ribonucleotide
  modified_base 42: mod_base = OTHER; note = 2'-O-methyl ribonucleotide
  modified_base 46: mod_base = OTHER; note = 2'-O-methyl ribonucleotide
  modified_base 48: mod_base = OTHER; note = 2'-O-methyl ribonucleotide
  modified_base 50: mod_base = OTHER; note = 2'-O-methyl ribonucleotide
  modified_base 52: mod_base = OTHER; note = 2'-O-methyl ribonucleotide
  modified_base 53: mod_base = OTHER; note = 2'-O-methyl ribonucleotide
  modified_base 54: mod_base = OTHER; note = 2'-O-methyl ribonucleotide
  modified_base 57: mod_base = OTHER; note = 2'-O-methyl ribonucleotide
  modified_base 61: mod_base = OTHER; note = 2'-O-methyl ribonucleotide
  modified_base 66: mod_base = OTHER; note = 2'-O-methyl ribonucleotide
  modified_base 67: mod_base = OTHER; note = 2'-O-methyl ribonucleotide
  modified_base 70: mod_base = OTHER; note = 2'-O-methyl ribonucleotide
  modified_base 71: mod_base = OTHER; note = 2'-O-methyl ribonucleotide
  modified_base 72: mod_base = OTHER; note = 2'-O-methyl ribonucleotide
  modified_base 73: mod_base = OTHER; note = 2'-O-methyl ribonucleotide
  modified_base 74: mod_base = OTHER; note = 2'-O-methyl ribonucleotide
  modified_base 75: mod_base = OTHER; note = 2'-O-methyl ribonucleotide
  modified_base 76: mod_base = OTHER; note = 2'-O-methyl ribonucleotide
  modified_base 77: mod_base = OTHER; note = 2'-O-methyl ribonucleotide
  modified_base 78: mod_base = OTHER; note = 2'-O-methyl ribonucleotide
  modified_base 79: mod_base = OTHER; note = 2'-O-methyl ribonucleotide
  modified_base 80: mod_base = OTHER; note = 2'-O-methyl ribonucleotide
  modified_base 82: mod_base = OTHER; note = 2'-O-methyl ribonucleotide
  modified_base 83: mod_base = OTHER; note = 2'-O-methyl ribonucleotide
  modified_base 84: mod_base = OTHER; note = 2'-O-methyl ribonucleotide
  modified_base 85: mod_base = OTHER; note = 2'-O-methyl ribonucleotide
  modified_base 86: mod_base = OTHER; note = 2'-O-methyl ribonucleotide
  modified_base 87: mod_base = OTHER; note = 2'-O-methyl ribonucleotide
  modified_base 89: mod_base = OTHER; note = 2'-O-methyl ribonucleotide
  modified_base 91: mod_base = OTHER; note = 2'-O-methyl ribonucleotide
  modified_base 92: mod_base = OTHER; note = 2'-O-methyl ribonucleotide
  modified_base 93: mod_base = OTHER; note = 2'-O-methyl ribonucleotide
  modified_base 94: mod_base = OTHER; note = 2'-O-methyl ribonucleotide
  modified_base 95: mod_base = OTHER; note = 2'-O-methyl ribonucleotide
  modified_base 96: mod_base = OTHER; note = 2'-O-methyl ribonucleotide
  modified_base 97: mod_base = OTHER; note = 2'-O-methyl ribonucleotide
  modified_base 98: mod_base = OTHER; note = 2'-O-methyl ribonucleotide
  modified_base 99: mod_base = OTHER; note = 2'-O-methyl ribonucleotide
  modified_base 100: mod_base = OTHER; note = 2'-O-methyl ribonucleotide
  modified_base 101: mod_base = OTHER; note = uniform ribonucleotides (A, C, G, inosine or U), deoxynucleotides (A, G, C, inosine or T), ribonebularine, 2'-O-methylnebularine or deoxynebularine
  modified_base 102: mod_base = OTHER; note = uniform ribonucleotides (A, C, G, inosine or U), deoxynucleotides (A, G, C, inosine or T), ribonebularine, 2'-O-methylnebularine or deoxynebularine
  modified_base 103: mod_base = OTHER; note = uniform ribonucleotides (A, C, G, inosine or U), deoxynucleotides (A, G, C, inosine or T), ribonebularine, 2'-O-methylnebularine or deoxynebularine
  modified_base 1..4: mod_base = OTHER; note = phosphorothioate linkage
  modified_base 45..46: mod_base = OTHER; note = phosphorothioate linkage
  modified_base 97..100: mod_base = OTHER; note = phosphorothioate linkage
  misc_feature 1..100: note = RNA
  misc_feature 101..103: note = Optionally DNA or RNA

SEQ ID NO: 2831 - DNA, 103 bp, synthetic construct; identical to SEQ ID NO: 1797
  source 1..103: mol_type = other DNA
  modified_base 1: mod_base = OTHER; note = 2'-O-methyl ribonucleotide
  modified_base 2: mod_base = OTHER; note = 2'-O-methyl ribonucleotide
  modified_base 3: mod_base = OTHER; note = 2'-O-methyl ribonucleotide
  modified_base 21: mod_base = OTHER; note = 2'-O-methyl ribonucleotide
  modified_base 28: mod_base = OTHER; note = 2'-O-methyl ribonucleotide
  modified_base 29: mod_base = OTHER; note = 2'-O-methyl ribonucleotide
  modified_base 30: mod_base = OTHER; note = 2'-O-methyl ribonucleotide
  modified_base 31: mod_base = OTHER; note = 2'-O-methyl ribonucleotide
  modified_base 32: mod_base = OTHER; note = 2'-O-methyl ribonucleotide
  modified_base 34: mod_base = OTHER; note = 2'-O-methyl ribonucleotide
  modified_base 35: mod_base = OTHER; note = 2'-O-methyl ribonucleotide
  modified_base 36: mod_base = OTHER; note = 2'-O-methyl ribonucleotide
  modified_base 37: mod_base = OTHER; note = 2'-O-methyl ribonucleotide
  modified_base 38: mod_base = OTHER; note = 2'-O-methyl ribonucleotide
  modified_base 39: mod_base = OTHER; note = 2'-O-methyl ribonucleotide
  modified_base 40: mod_base = OTHER; note = 2'-O-methyl ribonucleotide
  modified_base 41: mod_base = OTHER; note = 2'-O-methyl ribonucleotide
  modified_base 42: mod_base = OTHER; note = 2'-O-methyl ribonucleotide
  modified_base 46: mod_base = OTHER; note = 2'-O-methyl ribonucleotide
  modified_base 48: mod_base = OTHER; note = 2'-O-methyl ribonucleotide
  modified_base 50: mod_base = OTHER; note = 2'-O-methyl ribonucleotide
  modified_base 52: mod_base = OTHER; note = 2'-O-methyl ribonucleotide
  modified_base 53: mod_base = OTHER; note = 2'-O-methyl ribonucleotide
  modified_base 54: mod_base = OTHER; note = 2'-O-methyl ribonucleotide
  modified_base 55: mod_base = OTHER; note = 2'-O-methyl ribonucleotide
  modified_base 56: mod_base = OTHER; note = 2'-O-methyl ribonucleotide
  modified_base 57: mod_base = OTHER; note = 2'-O-methyl ribonucleotide
  modified_base 60: mod_base = OTHER; note = 2'-O-methyl ribonucleotide
  modified_base 61: mod_base = OTHER; note = 2'-O-methyl ribonucleotide
  modified_base 66: mod_base = OTHER; note = 2'-O-methyl ribonucleotide
  modified_base 67: mod_base = OTHER; note = 2'-O-methyl ribonucleotide
  modified_base 70: mod_base = OTHER; note = 2'-O-methyl ribonucleotide
  modified_base 71: mod_base = OTHER; note = 2'-O-methyl ribonucleotide
  modified_base 72: mod_base = OTHER; note = 2'-O-methyl ribonucleotide
  modified_base 74: mod_base = OTHER; note = 2'-O-methyl ribonucleotide
  modified_base 75: mod_base = OTHER; note = 2'-O-methyl ribonucleotide
  modified_base 76: mod_base = OTHER; note = 2'-O-methyl ribonucleotide
  modified_base 77: mod_base = OTHER; note = 2'-O-methyl ribonucleotide
  modified_base 78: mod_base = OTHER; note = 2'-O-methyl ribonucleotide
  modified_base 79: mod_base = OTHER; note = 2'-O-methyl ribonucleotide
  modified_base 80: mod_base = OTHER; note = 2'-O-methyl ribonucleotide
  modified_base 82: mod_base = OTHER; note = 2'-O-methyl ribonucleotide
  modified_base 83: mod_base = OTHER; note = 2'-O-methyl ribonucleotide
  modified_base 84: mod_base = OTHER; note = 2'-O-methyl ribonucleotide
  modified_base 85: mod_base = OTHER; note = 2'-O-methyl ribonucleotide
  modified_base 86: mod_base = OTHER; note = 2'-O-methyl ribonucleotide
  modified_base 87: mod_base = OTHER; note = 2'-O-methyl ribonucleotide
  modified_base 89: mod_base = OTHER; note = 2'-O-methyl ribonucleotide
  modified_base 92: mod_base = OTHER; note = 2'-O-methyl ribonucleotide
  modified_base 93: mod_base = OTHER; note = 2'-O-methyl ribonucleotide
  modified_base 94: mod_base = OTHER; note = 2'-O-methyl ribonucleotide
  modified_base 95: mod_base = OTHER; note = 2'-O-methyl ribonucleotide
  modified_base 96: mod_base = OTHER; note = 2'-O-methyl ribonucleotide
  modified_base 97: mod_base = OTHER; note = 2'-O-methyl ribonucleotide
  modified_base 98: mod_base = OTHER; note = 2'-O-methyl ribonucleotide
  modified_base 99: mod_base = OTHER; note = 2'-O-methyl ribonucleotide
  modified_base 100: mod_base = OTHER; note = 2'-O-methyl ribonucleotide
  modified_base 101: mod_base = OTHER; note = uniform ribonucleotides (A, C, G, inosine or U), deoxynucleotides (A, G, C, inosine or T), ribonebularine, 2'-O-methylnebularine or deoxynebularine
  modified_base 102: mod_base = OTHER; note = uniform ribonucleotides (A, C, G, inosine or U), deoxynucleotides (A, G, C, inosine or T), ribonebularine, 2'-O-methylnebularine or deoxynebularine
  modified_base 103: mod_base = OTHER; note = uniform ribonucleotides (A, C, G, inosine or U), deoxynucleotides (A, G, C, inosine or T), ribonebularine, 2'-O-methylnebularine or deoxynebularine
  modified_base 1..4: mod_base = OTHER; note = phosphorothioate linkage
  modified_base 45..46: mod_base = OTHER; note = phosphorothioate linkage
  modified_base 97..100: mod_base = OTHER; note = phosphorothioate linkage
  misc_feature 1..100: note = RNA
  misc_feature 101..103: note = Optionally DNA or RNA

SEQ ID NO: 2832 - DNA, 103 bp, synthetic construct; identical to SEQ ID NO: 1795
  source 1..103: mol_type = other DNA
  modified_base 1: mod_base = OTHER; note = 2'-O-methyl ribonucleotide
  modified_base 2: mod_base = OTHER; note = 2'-O-methyl ribonucleotide
  modified_base 3: mod_base = OTHER; note = 2'-O-methyl ribonucleotide
  modified_base 21: mod_base = OTHER; note = 2'-O-methyl ribonucleotide
  modified_base 28: mod_base = OTHER; note = 2'-O-methyl ribonucleotide
  modified_base 29: mod_base = OTHER; note = 2'-O-methyl ribonucleotide
  modified_base 30: mod_base = OTHER; note = 2'-O-methyl ribonucleotide
  modified_base 31: mod_base = OTHER; note = 2'-O-methyl ribonucleotide
  modified_base 32: mod_base = OTHER; note = 2'-O-methyl ribonucleotide
  modified_base 33: mod_base = OTHER; note = 2'-O-methyl ribonucleotide
  modified_base 34: mod_base = OTHER; note = 2'-O-methyl ribonucleotide
  modified_base 35: mod_base = OTHER; note = 2'-O-methyl ribonucleotide
  modified_base 36: mod_base = OTHER; note = 2'-O-methyl ribonucleotide
  modified_base 37: mod_base = OTHER; note = 2'-O-methyl ribonucleotide
  modified_base 38: mod_base = OTHER; note = 2'-O-methyl ribonucleotide
  modified_base 39: mod_base = OTHER; note = 2'-O-methyl ribonucleotide
  modified_base 40: mod_base = OTHER; note = 2'-O-methyl ribonucleotide
  modified_base 41: mod_base = OTHER; note = 2'-O-methyl ribonucleotide
  modified_base 42: mod_base = OTHER; note = 2'-O-methyl ribonucleotide
  modified_base 46: mod_base = OTHER; note = 2'-O-methyl ribonucleotide
  modified_base 48: mod_base = OTHER; note = 2'-O-methyl ribonucleotide
  modified_base 50: mod_base = OTHER; note = 2'-O-methyl ribonucleotide
  modified_base 52: mod_base = OTHER; note = 2'-O-methyl ribonucleotide
  modified_base 53: mod_base = OTHER; note = 2'-O-methyl ribonucleotide
  modified_base 54: mod_base = OTHER; note = 2'-O-methyl ribonucleotide
  modified_base 55: mod_base = OTHER; note = 2'-O-methyl ribonucleotide
  modified_base 56: mod_base = OTHER; note = 2'-O-methyl ribonucleotide
  modified_base 57: mod_base = OTHER; note = 2'-O-methyl ribonucleotide
  modified_base 60: mod_base = OTHER; note = 2'-O-methyl ribonucleotide
  modified_base 61: mod_base = OTHER; note = 2'-O-methyl ribonucleotide
  modified_base 66: mod_base = OTHER; note = 2'-O-methyl ribonucleotide
  modified_base 67: mod_base = OTHER; note = 2'-O-methyl ribonucleotide
  modified_base 70: mod_base = OTHER; note = 2'-O-methyl ribonucleotide
  modified_base 71: mod_base = OTHER; note = 2'-O-methyl ribonucleotide
  modified_base 72: mod_base = OTHER; note = 2'-O-methyl ribonucleotide
  modified_base 73: mod_base = OTHER; note = 2'-O-methyl ribonucleotide
  modified_base 74: mod_base = OTHER; note = 2'-O-methyl ribonucleotide
  modified_base 75: mod_base = OTHER; note = 2'-O-methyl ribonucleotide
  modified_base 76: mod_base = OTHER; note = 2'-O-methyl ribonucleotide
  modified_base 77: mod_base = OTHER; note = 2'-O-methyl ribonucleotide
  modified_base 78: mod_base = OTHER; note = 2'-O-methyl ribonucleotide
  modified_base 79: mod_base = OTHER; note = 2'-O-methyl ribonucleotide
  modified_base 80: mod_base = OTHER; note = 2'-O-methyl ribonucleotide
  modified_base 81: mod_base = OTHER; note = 2'-O-methyl ribonucleotide
  modified_base 83: mod_base = OTHER; note = 2'-O-methyl ribonucleotide
  modified_base 84: mod_base = OTHER; note = 2'-O-methyl ribonucleotide
  modified_base 85: mod_base = OTHER; note = 2'-O-methyl ribonucleotide
  modified_base 86: mod_base = OTHER; note = 2'-O-methyl ribonucleotide
  modified_base 87: mod_base = OTHER; note = 2'-O-methyl ribonucleotide
  modified_base 88: mod_base = OTHER; note = 2'-O-methyl ribonucleotide
  modified_base 89: mod_base = OTHER; note = 2'-O-methyl ribonucleotide
  modified_base 90: mod_base = OTHER; note = 2'-O-methyl ribonucleotide
  modified_base 91: mod_base = OTHER; note = 2'-O-methyl ribonucleotide
  modified_base 92: mod_base = OTHER; note = 2'-O-methyl ribonucleotide
  modified_base 93: mod_base = OTHER; note = 2'-O-methyl ribonucleotide
  modified_base 94: mod_base = OTHER; note = 2'-O-methyl ribonucleotide
  modified_base 95: mod_base = OTHER; note = 2'-O-methyl ribonucleotide
  modified_base 96: mod_base = OTHER; note = 2'-O-methyl ribonucleotide
  modified_base 97: mod_base = OTHER; note = 2'-O-methyl ribonucleotide
  modified_base 98: mod_base = OTHER; note = 2'-O-methyl ribonucleotide
  modified_base 99: mod_base = OTHER; note = 2'-O-methyl ribonucleotide
  modified_base 100: mod_base = OTHER; note = 2'-O-methyl ribonucleotide
  modified_base 101: mod_base = OTHER; note = uniform ribonucleotides (A, C, G, inosine or U), deoxynucleotides (A, G, C, inosine or T), ribonebularine, 2'-O-methylnebularine or deoxynebularine
  modified_base 102: mod_base = OTHER; note = uniform ribonucleotides (A, C, G, inosine or U), deoxynucleotides (A, G, C, inosine or T), ribonebularine, 2'-O-methylnebularine or deoxynebularine
  modified_base 103: mod_base = OTHER; note = uniform ribonucleotides (A, C, G, inosine or U), deoxynucleotides (A, G, C, inosine or T), ribonebularine, 2'-O-methylnebularine or deoxynebularine
  modified_base 1..4: mod_base = OTHER; note = phosphorothioate linkage
  modified_base 25..26: mod_base = OTHER; note = phosphorothioate linkage
  modified_base 97..100: mod_base = OTHER; note = phosphorothioate linkage
  misc_feature 1..100: note = RNA
  misc_feature 101..103: note = Optionally DNA or RNA

SEQ ID NO: 2833 - DNA, 103 bp, synthetic construct; identical to SEQ ID NO: 1795
  source 1..103: mol_type = other DNA
  modified_base 1: mod_base = OTHER; note = 2'-O-methyl ribonucleotide
  modified_base 2: mod_base = OTHER; note = 2'-O-methyl ribonucleotide
  modified_base 3: mod_base = OTHER; note = 2'-O-methyl ribonucleotide
  modified_base 21: mod_base = OTHER; note = 2'-O-methyl ribonucleotide
  modified_base 28: mod_base = OTHER; note = 2'-O-methyl ribonucleotide
  modified_base 29: mod_base = OTHER; note = 2'-O-methyl ribonucleotide
  modified_base 30: mod_base = OTHER; note = 2'-O-methyl ribonucleotide
  modified_base 31: mod_base = OTHER; note = 2'-O-methyl ribonucleotide
  modified_base 32: mod_base = OTHER; note = 2'-O-methyl ribonucleotide
  modified_base 34: mod_base = OTHER; note = 2'-O-methyl ribonucleotide
  modified_base 35: mod_base = OTHER; note = 2'-O-methyl ribonucleotide
  modified_base 36: mod_base = OTHER; note = 2'-O-methyl ribonucleotide
  modified_base 37: mod_base = OTHER; note = 2'-O-methyl ribonucleotide
  modified_base 38: mod_base = OTHER; note = 2'-O-methyl ribonucleotide
  modified_base 39: mod_base = OTHER; note = 2'-O-methyl ribonucleotide
  modified_base 40: mod_base = OTHER; note = 2'-O-methyl ribonucleotide
  modified_base 41: mod_base = OTHER; note = 2'-O-methyl ribonucleotide
  modified_base 42: mod_base = OTHER; note = 2'-O-methyl ribonucleotide
  modified_base 46: mod_base = OTHER; note = 2'-O-methyl ribonucleotide
  modified_base 48: mod_base = OTHER; note = 2'-O-methyl ribonucleotide
  modified_base 50: mod_base = OTHER; note = 2'-O-methyl ribonucleotide
  modified_base 52: mod_base = OTHER; note = 2'-O-methyl ribonucleotide
  modified_base 53: mod_base = OTHER; note = 2'-O-methyl ribonucleotide
  modified_base 54: mod_base = OTHER; note = 2'-O-methyl ribonucleotide
  modified_base 55: mod_base = OTHER; note = 2'-O-methyl ribonucleotide
  modified_base 56: mod_base = OTHER; note = 2'-O-methyl ribonucleotide
  modified_base 57: mod_base = OTHER; note = 2'-O-methyl ribonucleotide
  modified_base 60: mod_base = OTHER; note = 2'-O-methyl ribonucleotide
  modified_base 61: mod_base = OTHER; note = 2'-O-methyl ribonucleotide
  modified_base 66: mod_base = OTHER; note = 2'-O-methyl ribonucleotide
  modified_base 67: mod_base = OTHER; note = 2'-O-methyl ribonucleotide
  modified_base 70: mod_base = OTHER; note = 2'-O-methyl ribonucleotide
  modified_base 71: mod_base = OTHER; note = 2'-O-methyl ribonucleotide
  modified_base 72: mod_base = OTHER; note = 2'-O-methyl ribonucleotide
  modified_base 74: mod_base = OTHER; note = 2'-O-methyl ribonucleotide
  modified_base 75: mod_base = OTHER; note = 2'-O-methyl ribonucleotide
  modified_base 76: mod_base = OTHER; note = 2'-O-methyl ribonucleotide
  modified_base 77: mod_base = OTHER; note = 2'-O-methyl ribonucleotide
  modified_base 78: mod_base = OTHER; note = 2'-O-methyl ribonucleotide
  modified_base 79: mod_base = OTHER; note = 2'-O-methyl ribonucleotide
  modified_base 80: mod_base = OTHER; note = 2'-O-methyl ribonucleotide
  modified_base 81: mod_base = OTHER; note = 2'-O-methyl ribonucleotide
  modified_base 83: mod_base = OTHER; note = 2'-O-methyl ribonucleotide
  modified_base 84: mod_base = OTHER; note = 2'-O-methyl ribonucleotide
  modified_base 85: mod_base = OTHER; note = 2'-O-methyl ribonucleotide
  modified_base 86: mod_base = OTHER; note = 2'-O-methyl ribonucleotide
  modified_base 87: mod_base = OTHER; note = 2'-O-methyl ribonucleotide
  modified_base 88: mod_base = OTHER; note = 2'-O-methyl ribonucleotide
  modified_base 89: mod_base = OTHER; note = 2'-O-methyl ribonucleotide
  modified_base 90: mod_base = OTHER; note = 2'-O-methyl ribonucleotide
  modified_base 91: mod_base = OTHER; note = 2'-O-methyl ribonucleotide
  modified_base 92: mod_base = OTHER; note = 2'-O-methyl ribonucleotide
  modified_base 93: mod_base = OTHER; note = 2'-O-methyl ribonucleotide
  modified_base 94: mod_base = OTHER; note = 2'-O-methyl ribonucleotide
  modified_base 95: mod_base = OTHER; note = 2'-O-methyl ribonucleotide
  modified_base 96: mod_base = OTHER; note = 2'-O-methyl ribonucleotide
  modified_base 97: mod_base = OTHER; note = 2'-O-methyl ribonucleotide
  modified_base 98: mod_base = OTHER; note = 2'-O-methyl ribonucleotide
  modified_base 99: mod_base = OTHER; note = 2'-O-methyl ribonucleotide
  modified_base 100: mod_base = OTHER; note = 2'-O-methyl ribonucleotide
  modified_base 101: mod_base = OTHER; note = uniform ribonucleotides (A, C, G, inosine or U), deoxynucleotides (A, G, C, inosine or T), ribonebularine, 2'-O-methylnebularine or deoxynebularine
  modified_base 102: mod_base = OTHER; note = uniform ribonucleotides (A, C, G, inosine or U), deoxynucleotides (A, G, C, inosine or T), ribonebularine, 2'-O-methylnebularine or deoxynebularine
  modified_base 103: mod_base = OTHER; note = uniform ribonucleotides (A, C, G, inosine or U), deoxynucleotides (A, G, C, inosine or T), ribonebularine, 2'-O-methylnebularine or deoxynebularine
  modified_base 1..4: mod_base = OTHER; note = phosphorothioate linkage
  modified_base 25..26: mod_base = OTHER; note = phosphorothioate linkage
  modified_base 97..100: mod_base = OTHER; note = phosphorothioate linkage
  misc_feature 1..100: note = RNA
  misc_feature 101..103: note = Optionally DNA or RNA

SEQ ID NO: 2834 - DNA, 103 bp, synthetic construct; identical to SEQ ID NO: 1796
  source 1..103: mol_type = other DNA
  modified_base 1: mod_base = OTHER; note = 2'-O-methyl ribonucleotide
  modified_base 2: mod_base = OTHER; note = 2'-O-methyl ribonucleotide
  modified_base 3: mod_base = OTHER; note = 2'-O-methyl ribonucleotide
  modified_base 21: mod_base = OTHER; note = 2'-O-methyl ribonucleotide
  modified_base 28: mod_base = OTHER; note = 2'-O-methyl ribonucleotide
  modified_base 29: mod_base = OTHER; note = 2'-O-methyl ribonucleotide
  modified_base 30: mod_base = OTHER; note = 2'-O-methyl ribonucleotide
  modified_base 31: mod_base = OTHER; note = 2'-O-methyl ribonucleotide
  modified_base 32: mod_base = OTHER; note = 2'-O-methyl ribonucleotide
  modified_base 33: mod_base = OTHER; note = 2'-O-methyl ribonucleotide
  modified_base 34: mod_base = OTHER; note = 2'-O-methyl ribonucleotide
  modified_base 35: mod_base = OTHER; note = 2'-O-methyl ribonucleotide
  modified_base 36: mod_base = OTHER; note = 2'-O-methyl ribonucleotide
  modified_base 37: mod_base = OTHER; note = 2'-O-methyl ribonucleotide
  modified_base 38: mod_base = OTHER; note = 2'-O-methyl ribonucleotide
  modified_base 39: mod_base = OTHER; note = 2'-O-methyl ribonucleotide
  modified_base 40: mod_base = OTHER; note = 2'-O-methyl ribonucleotide
  modified_base 41: mod_base = OTHER; note = 2'-O-methyl ribonucleotide
  modified_base 42: mod_base = OTHER; note = 2'-O-methyl ribonucleotide
  modified_base 46: mod_base = OTHER; note = 2'-O-methyl ribonucleotide
  modified_base 48: mod_base = OTHER; note = 2'-O-methyl ribonucleotide
  modified_base 50: mod_base = OTHER; note = 2'-O-methyl ribonucleotide
  modified_base 52: mod_base = OTHER; note = 2'-O-methyl ribonucleotide
  modified_base 53: mod_base = OTHER; note = 2'-O-methyl ribonucleotide
  modified_base 54: mod_base = OTHER; note = 2'-O-methyl ribonucleotide
  modified_base 55: mod_base = OTHER; note = 2'-O-methyl ribonucleotide
  modified_base 56: mod_base = OTHER; note = 2'-O-methyl ribonucleotide
  modified_base 57: mod_base = OTHER; note = 2'-O-methyl ribonucleotide
  modified_base 60: mod_base = OTHER; note = 2'-O-methyl ribonucleotide
  modified_base 61: mod_base = OTHER; note = 2'-O-methyl ribonucleotide
  modified_base 66: mod_base = OTHER; note = 2'-O-methyl ribonucleotide
  modified_base 67: mod_base = OTHER; note = 2'-O-methyl ribonucleotide
  modified_base 70: mod_base = OTHER; note = 2'-O-methyl ribonucleotide
  modified_base 71: mod_base = OTHER; note = 2'-O-methyl ribonucleotide
  modified_base 72: mod_base = OTHER; note = 2'-O-methyl ribonucleotide
  modified_base 73: mod_base = OTHER; note = 2'-O-methyl ribonucleotide
  modified_base 74: mod_base = OTHER; note = 2'-O-methyl ribonucleotide
  modified_base 75: mod_base = OTHER; note = 2'-O-methyl ribonucleotide
  modified_base 76: mod_base = OTHER; note = 2'-O-methyl ribonucleotide
  modified_base 77: mod_base = OTHER; note = 2'-O-methyl ribonucleotide
  modified_base 78: mod_base = OTHER; note = 2'-O-methyl ribonucleotide
  modified_base 79: mod_base = OTHER; note = 2'-O-methyl ribonucleotide
  modified_base 80: mod_base = OTHER; note = 2'-O-methyl ribonucleotide
  modified_base 81: mod_base = OTHER; note = 2'-O-methyl ribonucleotide
  modified_base 83: mod_base = OTHER; note = 2'-O-methyl ribonucleotide
  modified_base 84: mod_base = OTHER; note = 2'-O-methyl ribonucleotide
  modified_base 85: mod_base = OTHER; note = 2'-O-methyl ribonucleotide
  modified_base 86: mod_base = OTHER; note = 2'-O-methyl ribonucleotide
  modified_base 87: mod_base = OTHER; note = 2'-O-methyl ribonucleotide
  modified_base 88: mod_base = OTHER; note = 2'-O-methyl ribonucleotide
  modified_base 89: mod_base = OTHER; note = 2'-O-methyl ribonucleotide
  modified_base 90: mod_base = OTHER; note = 2'-O-methyl ribonucleotide
  modified_base 91: mod_base = OTHER; note = 2'-O-methyl ribonucleotide
  modified_base 92: mod_base = OTHER; note = 2'-O-methyl ribonucleotide
  modified_base 93: mod_base = OTHER; note = 2'-O-methyl ribonucleotide
  modified_base 94: mod_base = OTHER; note = 2'-O-methyl ribonucleotide
  modified_base 95: mod_base = OTHER; note = 2'-O-methyl ribonucleotide
  modified_base 96: mod_base = OTHER; note = 2'-O-methyl ribonucleotide
  modified_base 97: mod_base = OTHER; note = 2'-O-methyl ribonucleotide
  modified_base 98: mod_base = OTHER; note = 2'-O-methyl ribonucleotide
  modified_base 99: mod_base = OTHER; note = 2'-O-methyl ribonucleotide
  modified_base 100: mod_base = OTHER; note = 2'-O-methyl ribonucleotide
  modified_base 101: mod_base = OTHER; note = uniform ribonucleotides (A, C, G, inosine or U), deoxynucleotides (A, G, C, inosine or T), ribonebularine, 2'-O-methylnebularine or deoxynebularine
  modified_base 102: mod_base = OTHER; note = uniform ribonucleotides (A, C, G, inosine or U), deoxynucleotides (A, G, C, inosine or T), ribonebularine, 2'-O-methylnebularine or deoxynebularine
  modified_base 103: mod_base = OTHER; note = uniform ribonucleotides (A, C, G, inosine or U), deoxynucleotides (A, G, C, inosine or T), ribonebularine, 2'-O-methylnebularine or deoxynebularine
  modified_base 1..4: mod_base = OTHER; note = phosphorothioate linkage
  modified_base 25..26: mod_base = OTHER; note = phosphorothioate linkage
  modified_base 97..100: mod_base = OTHER; note = phosphorothioate linkage
  misc_feature 1..100: note = RNA
  misc_feature 101..103: note = Optionally DNA or RNA

SEQ ID NO: 2835 - DNA, 103 bp, synthetic construct; identical to SEQ ID NO: 1796
  source 1..103: mol_type = other DNA
  modified_base 1: mod_base = OTHER; note = 2'-O-methyl ribonucleotide
  modified_base 2: mod_base = OTHER; note = 2'-O-methyl ribonucleotide
  modified_base 3: mod_base = OTHER; note = 2'-O-methyl ribonucleotide
  modified_base 21: mod_base = OTHER; note = 2'-O-methyl ribonucleotide
  modified_base 28: mod_base = OTHER; note = 2'-O-methyl ribonucleotide
  modified_base 29: mod_base = OTHER; note = 2'-O-methyl ribonucleotide
  modified_base 30: mod_base = OTHER; note = 2'-O-methyl ribonucleotide
  modified_base 31: mod_base = OTHER; note = 2'-O-methyl ribonucleotide
  modified_base 32: mod_base = OTHER; note = 2'-O-methyl ribonucleotide
  modified_base 34: mod_base = OTHER; note = 2'-O-methyl ribonucleotide
  modified_base 35: mod_base = OTHER; note = 2'-O-methyl ribonucleotide
  modified_base 36: mod_base = OTHER; note = 2'-O-methyl ribonucleotide
  modified_base 37: mod_base = OTHER; note = 2'-O-methyl ribonucleotide
  modified_base 38: mod_base = OTHER; note = 2'-O-methyl ribonucleotide
  modified_base 39: mod_base = OTHER; note = 2'-O-methyl ribonucleotide
  modified_base 40: mod_base = OTHER; note = 2'-O-methyl ribonucleotide
  modified_base 41: mod_base = OTHER; note = 2'-O-methyl ribonucleotide
  modified_base 42: mod_base = OTHER; note = 2'-O-methyl ribonucleotide
  modified_base 46: mod_base = OTHER; note = 2'-O-methyl ribonucleotide
  modified_base 48: mod_base = OTHER; note = 2'-O-methyl ribonucleotide
  modified_base 50: mod_base = OTHER; note = 2'-O-methyl ribonucleotide
  modified_base 52: mod_base = OTHER; note = 2'-O-methyl ribonucleotide
  modified_base 53: mod_base = OTHER; note = 2'-O-methyl ribonucleotide
  modified_base 54: mod_base = OTHER; note = 2'-O-methyl ribonucleotide
  modified_base 55: mod_base = OTHER; note = 2'-O-methyl ribonucleotide
  modified_base 56: mod_base = OTHER; note = 2'-O-methyl ribonucleotide
  modified_base 57: mod_base = OTHER; note = 2'-O-methyl ribonucleotide
  modified_base 60: mod_base = OTHER; note = 2'-O-methyl ribonucleotide
  modified_base 61: mod_base = OTHER; note = 2'-O-methyl ribonucleotide
  modified_base 66: mod_base = OTHER; note = 2'-O-methyl ribonucleotide
  modified_base 67: mod_base = OTHER; note = 2'-O-methyl ribonucleotide
  modified_base 70: mod_base = OTHER; note = 2'-O-methyl ribonucleotide
  modified_base 71: mod_base = OTHER; note = 2'-O-methyl ribonucleotide
  modified_base 72: mod_base = OTHER; note = 2'-O-methyl ribonucleotide
  modified_base 74: mod_base = OTHER; note = 2'-O-methyl ribonucleotide
  modified_base 75: mod_base = OTHER; note = 2'-O-methyl ribonucleotide
  modified_base 76: mod_base = OTHER; note = 2'-O-methyl ribonucleotide
  modified_base 77: mod_base = OTHER; note = 2'-O-methyl ribonucleotide
  modified_base 78: mod_base = OTHER; note = 2'-O-methyl ribonucleotide
  modified_base 79: mod_base = OTHER; note = 2'-O-methyl ribonucleotide
  modified_base 80: mod_base = OTHER; note = 2'-O-methyl ribonucleotide
  modified_base 81: mod_base = OTHER; note = 2'-O-methyl ribonucleotide
  modified_base 83: mod_base = OTHER; note = 2'-O-methyl ribonucleotide
  modified_base 84: mod_base = OTHER; note = 2'-O-methyl ribonucleotide
  modified_base 85: mod_base = OTHER; note = 2'-O-methyl ribonucleotide
  modified_base 86: mod_base = OTHER; note = 2'-O-methyl ribonucleotide
  modified_base 87: mod_base = OTHER; note = 2'-O-methyl ribonucleotide
  modified_base 88: mod_base = OTHER; note = 2'-O-methyl ribonucleotide
  modified_base 89: mod_base = OTHER; note = 2'-O-methyl ribonucleotide
  modified_base 90: mod_base = OTHER; note = 2'-O-methyl ribonucleotide
  modified_base 91: mod_base = OTHER; note = 2'-O-methyl ribonucleotide
  modified_base 92: mod_base = OTHER; note = 2'-O-methyl ribonucleotide
  modified_base 93: mod_base = OTHER; note = 2'-O-methyl ribonucleotide
  modified_base 94: mod_base = OTHER; note = 2'-O-methyl ribonucleotide
  modified_base 95: mod_base = OTHER; note = 2'-O-methyl ribonucleotide
  modified_base 96: mod_base = OTHER; note = 2'-O-methyl ribonucleotide
  modified_base 97: mod_base = OTHER; note = 2'-O-methyl ribonucleotide
  modified_base 98: mod_base = OTHER; note = 2'-O-methyl ribonucleotide
  modified_base 99: mod_base = OTHER; note = 2'-O-methyl ribonucleotide
  modified_base 100: mod_base = OTHER; note = 2'-O-methyl ribonucleotide
  modified_base 101: mod_base = OTHER; note = uniform ribonucleotides (A, C, G, inosine or U), deoxynucleotides (A, G, C, inosine or T), ribonebularine, 2'-O-methylnebularine or deoxynebularine
  modified_base 102: mod_base = OTHER; note = uniform ribonucleotides (A, C, G, inosine or U), deoxynucleotides (A, G, C, inosine or T), ribonebularine, 2'-O-methylnebularine or deoxynebularine
  modified_base 103: mod_base = OTHER; note = uniform ribonucleotides (A, C, G, inosine or U), deoxynucleotides (A, G, C, inosine or T), ribonebularine, 2'-O-methylnebularine or deoxynebularine
  modified_base 1..4: mod_base = OTHER; note = phosphorothioate linkage
  modified_base 25..26: mod_base = OTHER; note = phosphorothioate linkage
  modified_base 97..100: mod_base = OTHER; note = phosphorothioate linkage
  misc_feature 1..100: note = RNA
  misc_feature 101..103: note = Optionally DNA or RNA

SEQ ID NO: 2836 - DNA, 103 bp, synthetic construct; identical to SEQ ID NO: 1797
  source 1..103: mol_type = other DNA
  modified_base 1: mod_base = OTHER; note = 2'-O-methyl ribonucleotide
  modified_base 2: mod_base = OTHER; note = 2'-O-methyl ribonucleotide
  modified_base 3: mod_base = OTHER; note = 2'-O-methyl ribonucleotide
  modified_base 21: mod_base = OTHER; note = 2'-O-methyl ribonucleotide
  modified_base 28: mod_base = OTHER; note = 2'-O-methyl ribonucleotide
  modified_base 29: mod_base = OTHER; note = 2'-O-methyl ribonucleotide
  modified_base 30: mod_base = OTHER; note = 2'-O-methyl ribonucleotide
  modified_base 31: mod_base = OTHER; note = 2'-O-methyl ribonucleotide
  modified_base 32: mod_base = OTHER; note = 2'-O-methyl ribonucleotide
  modified_base 33: mod_base = OTHER; note = 2'-O-methyl ribonucleotide
  modified_base 34: mod_base = OTHER; note = 2'-O-methyl ribonucleotide
  modified_base 35: mod_base = OTHER; note = 2'-O-methyl ribonucleotide
  modified_base 36: mod_base = OTHER; note = 2'-O-methyl ribonucleotide
  modified_base 37: mod_base = OTHER; note = 2'-O-methyl ribonucleotide
  modified_base 38: mod_base = OTHER; note = 2'-O-methyl ribonucleotide
  modified_base 39: mod_base = OTHER; note = 2'-O-methyl ribonucleotide
  modified_base 40: mod_base = OTHER; note = 2'-O-methyl ribonucleotide
  modified_base 41: mod_base = OTHER; note = 2'-O-methyl ribonucleotide
  modified_base 42: mod_base = OTHER; note = 2'-O-methyl ribonucleotide
  modified_base 46: mod_base = OTHER; note = 2'-O-methyl ribonucleotide
  modified_base 48: mod_base = OTHER; note = 2'-O-methyl ribonucleotide
  modified_base 50: mod_base = OTHER; note = 2'-O-methyl ribonucleotide
  modified_base 52: mod_base = OTHER; note = 2'-O-methyl ribonucleotide
  modified_base 53: mod_base = OTHER; note = 2'-O-methyl ribonucleotide
  modified_base 54: mod_base = OTHER; note = 2'-O-methyl ribonucleotide
  modified_base 57: mod_base = OTHER; note = 2'-O-methyl ribonucleotide
  modified_base 61: mod_base = OTHER; note = 2'-O-methyl ribonucleotide
  modified_base 66: mod_base = OTHER; note = 2'-O-methyl ribonucleotide
  modified_base 67: mod_base = OTHER; note = 2'-O-methyl ribonucleotide
  modified_base 70: mod_base = OTHER; note = 2'-O-methyl ribonucleotide
  modified_base 71: mod_base = OTHER; note = 2'-O-methyl ribonucleotide
  modified_base 72: mod_base = OTHER; note = 2'-O-methyl ribonucleotide
  modified_base 74: mod_base = OTHER; note = 2'-O-methyl ribonucleotide
  modified_base 75: mod_base = OTHER; note = 2'-O-methyl ribonucleotide
  modified_base 76: mod_base = OTHER; note = 2'-O-methyl ribonucleotide
  modified_base 77: mod_base = OTHER; note = 2'-O-methyl ribonucleotide
  modified_base 78: mod_base = OTHER; note = 2'-O-methyl ribonucleotide
  modified_base 79: mod_base = OTHER; note = 2'-O-methyl ribonucleotide
  modified_base 80: mod_base = OTHER; note = 2'-O-methyl ribonucleotide
  modified_base 82: mod_base = OTHER; note = 2'-O-methyl ribonucleotide
  modified_base 83: mod_base = OTHER; note = 2'-O-methyl ribonucleotide
  modified_base 84: mod_base = OTHER; note = 2'-O-methyl ribonucleotide
  modified_base 85: mod_base = OTHER; note = 2'-O-methyl ribonucleotide
  modified_base 86: mod_base = OTHER; note = 2'-O-methyl ribonucleotide
  modified_base 87: mod_base = OTHER; note = 2'-O-methyl ribonucleotide
  modified_base 89: mod_base = OTHER; note = 2'-O-methyl ribonucleotide
  modified_base 92: mod_base = OTHER; note = 2'-O-methyl ribonucleotide
  modified_base 93: mod_base = OTHER; note = 2'-O-methyl ribonucleotide
  modified_base 94: mod_base = OTHER; note = 2'-O-methyl ribonucleotide
  modified_base 95: mod_base = OTHER; note = 2'-O-methyl ribonucleotide
  modified_base 96: mod_base = OTHER; note = 2'-O-methyl ribonucleotide
  modified_base 97: mod_base = OTHER; note = 2'-O-methyl ribonucleotide
  modified_base 98: mod_base = OTHER; note = 2'-O-methyl ribonucleotide
  modified_base 99: mod_base = OTHER; note = 2'-O-methyl ribonucleotide
  modified_base 100: mod_base = OTHER; note = 2'-O-methyl ribonucleotide
  modified_base 101: mod_base = OTHER; note = uniform ribonucleotides (A, C, G, inosine or U), deoxynucleotides (A, G, C, inosine or T), ribonebularine, 2'-O-methylnebularine or deoxynebularine
  modified_base 102: mod_base = OTHER; note = uniform ribonucleotides (A, C, G, inosine or U), deoxynucleotides (A, G, C, inosine or T), ribonebularine, 2'-O-methylnebularine or deoxynebularine
  modified_base 103: mod_base = OTHER; note = uniform ribonucleotides (A, C, G, inosine or U), deoxynucleotides (A, G, C, inosine or T), ribonebularine, 2'-O-methylnebularine or deoxynebularine
  modified_base 1..4: mod_base = OTHER; note = phosphorothioate linkage
  modified_base 25..26: mod_base = OTHER; note = phosphorothioate linkage
  modified_base 97..100: mod_base = OTHER; note = phosphorothioate linkage
  misc_feature 1..100: note = RNA
  misc_feature 101..103: note = Optionally DNA or RNA

SEQ ID NO: 2837 - DNA, 103 bp, synthetic construct; identical to SEQ ID NO: 1797
  source 1..103: mol_type = other DNA
  modified_base 1: mod_base = OTHER; note = 2'-O-methyl ribonucleotide
  modified_base 2: mod_base = OTHER; note = 2'-O-methyl ribonucleotide
  modified_base 3: mod_base = OTHER; note = 2'-O-methyl ribonucleotide
  modified_base 21: mod_base = OTHER; note = 2'-O-methyl ribonucleotide
  modified_base 28: mod_base = OTHER; note = 2'-O-methyl ribonucleotide
  modified_base 29: mod_base = OTHER; note = 2'-O-methyl ribonucleotide
  modified_base 30: mod_base = OTHER; note = 2'-O-methyl ribonucleotide
  modified_base 31: mod_base = OTHER; note = 2'-O-methyl ribonucleotide
  modified_base 32: mod_base = OTHER; note = 2'-O-methyl ribonucleotide
  modified_base 33: mod_base = OTHER; note = 2'-O-methyl ribonucleotide
  modified_base 34: mod_base = OTHER; note = 2'-O-methyl ribonucleotide
  modified_base 35: mod_base = OTHER; note = 2'-O-methyl ribonucleotide
  modified_base 36: mod_base = OTHER; note = 2'-O-methyl ribonucleotide
  modified_base 37: mod_base = OTHER; note = 2'-O-methyl ribonucleotide
  modified_base 38: mod_base = OTHER; note = 2'-O-methyl ribonucleotide
  modified_base 39: mod_base = OTHER; note = 2'-O-methyl ribonucleotide
  modified_base 40: mod_base = OTHER; note = 2'-O-methyl ribonucleotide
  modified_base 41: mod_base = OTHER; note = 2'-O-methyl ribonucleotide
  modified_base 42: mod_base = OTHER; note = 2'-O-methyl ribonucleotide
  modified_base 46: mod_base = OTHER; note = 2'-O-methyl ribonucleotide
  modified_base 48: mod_base = OTHER; note = 2'-O-methyl ribonucleotide
  modified_base 50: mod_base = OTHER; note = 2'-O-methyl ribonucleotide
  modified_base 52: mod_base = OTHER; note = 2'-O-methyl ribonucleotide
  modified_base 53: mod_base = OTHER; note = 2'-O-methyl ribonucleotide
  modified_base 54: mod_base = OTHER; note = 2'-O-methyl ribonucleotide
  modified_base 55: mod_base = OTHER; note = 2'-O-methyl ribonucleotide
  modified_base 56: mod_base = OTHER; note = 2'-O-methyl ribonucleotide
  modified_base 57: mod_base = OTHER; note = 2'-O-methyl ribonucleotide
  modified_base 60: mod_base = OTHER; note = 2'-O-methyl ribonucleotide
  modified_base 61: mod_base = OTHER; note = 2'-O-methyl ribonucleotide
  modified_base 66: mod_base = OTHER; note = 2'-O-methyl ribonucleotide
  modified_base 67: mod_base = OTHER; note = 2'-O-methyl ribonucleotide
  modified_base 70: mod_base = OTHER; note = 2'-O-methyl ribonucleotide
  modified_base 71: mod_base = OTHER; note = 2'-O-methyl ribonucleotide
  modified_base 72: mod_base = OTHER; note = 2'-O-methyl ribonucleotide
  modified_base 74: mod_base = OTHER; note = 2'-O-methyl ribonucleotide
  modified_base 75: mod_base = OTHER; note = 2'-O-methyl ribonucleotide
  modified_base 76: mod_base = OTHER; note = 2'-O-methyl ribonucleotide
  modified_base 77: mod_base = OTHER; note = 2'-O-methyl ribonucleotide
  modified_base 78: mod_base = OTHER; note = 2'-O-methyl ribonucleotide
  modified_base 79: mod_base = OTHER; note = 2'-O-methyl ribonucleotide
  modified_base 80: mod_base = OTHER; note = 2'-O-methyl ribonucleotide
  modified_base 82: mod_base = OTHER; note = 2'-O-methyl ribonucleotide
  modified_base 83: mod_base = OTHER; note = 2'-O-methyl ribonucleotide
  modified_base 84: mod_base = OTHER; note = 2'-O-methyl ribonucleotide
  modified_base 85: mod_base = OTHER; note = 2'-O-methyl ribonucleotide
  modified_base 86: mod_base = OTHER; note = 2'-O-methyl ribonucleotide
  modified_base 87: mod_base = OTHER; note = 2'-O-methyl ribonucleotide
  modified_base 89: mod_base = OTHER; note = 2'-O-methyl ribonucleotide
  modified_base 92: mod_base = OTHER; note = 2'-O-methyl ribonucleotide
  modified_base 93: mod_base = OTHER; note = 2'-O-methyl ribonucleotide
  modified_base 94: mod_base = OTHER; note = 2'-O-methyl ribonucleotide
  modified_base 95: mod_base = OTHER; note = 2'-O-methyl ribonucleotide
  modified_base 96: mod_base = OTHER; note = 2'-O-methyl ribonucleotide
  modified_base 97: mod_base = OTHER; note = 2'-O-methyl ribonucleotide
  modified_base 98: mod_base = OTHER; note = 2'-O-methyl ribonucleotide
  modified_base 99: mod_base = OTHER; note = 2'-O-methyl ribonucleotide
  modified_base 100: mod_base = OTHER; note = 2'-O-methyl ribonucleotide
  modified_base 101: mod_base = OTHER; note = uniform ribonucleotides (A, C, G, inosine or U), deoxynucleotides (A, G, C, inosine or T), ribonebularine, 2'-O-methylnebularine or deoxynebularine
  modified_base 102: mod_base = OTHER; note = uniform ribonucleotides (A, C, G, inosine or U), deoxynucleotides (A, G, C, inosine or T), ribonebularine, 2'-O-methylnebularine or deoxynebularine
  modified_base 103: mod_base = OTHER; note = uniform ribonucleotides (A, C, G, inosine or U), deoxynucleotides (A, G, C, inosine or T), ribonebularine, 2'-O-methylnebularine or deoxynebularine
  modified_base 1..4: mod_base = OTHER; note = phosphorothioate linkage
  modified_base 25..26: mod_base = OTHER; note = phosphorothioate linkage
  modified_base 97..100: mod_base = OTHER; note = phosphorothioate linkage
  misc_feature 1..100: note = RNA
  misc_feature 101..103: note = Optionally DNA or RNA

SEQ ID NO: 2838 - DNA, 103 bp, synthetic construct; identical to SEQ ID NO: 1797
  source 1..103: mol_type = other DNA
  modified_base 1: mod_base = OTHER; note = 2'-O-methyl ribonucleotide
  modified_base 2: mod_base = OTHER; note = 2'-O-methyl ribonucleotide
  modified_base 3: mod_base = OTHER; note = 2'-O-methyl ribonucleotide
  modified_base 21: mod_base = OTHER; note = 2'-O-methyl ribonucleotide
  modified_base 28: mod_base = OTHER; note = 2'-O-methyl ribonucleotide
  modified_base 29: mod_base = OTHER; note = 2'-O-methyl ribonucleotide
  modified_base 30: mod_base = OTHER; note = 2'-O-methyl ribonucleotide
  modified_base 31: mod_base = OTHER; note = 2'-O-methyl ribonucleotide
  modified_base 32: mod_base = OTHER; note = 2'-O-methyl ribonucleotide
  modified_base 33: mod_base = OTHER; note = 2'-O-methyl ribonucleotide
  modified_base 34: mod_base = OTHER; note = 2'-O-methyl ribonucleotide
  modified_base 35: mod_base = OTHER; note = 2'-O-methyl ribonucleotide
  modified_base 36: mod_base = OTHER; note = 2'-O-methyl ribonucleotide
  modified_base 37: mod_base = OTHER; note = 2'-O-methyl ribonucleotide
  modified_base 38: mod_base = OTHER; note = 2'-O-methyl ribonucleotide
  modified_base 39: mod_base = OTHER; note = 2'-O-methyl ribonucleotide
  modified_base 40: mod_base = OTHER; note = 2'-O-methyl ribonucleotide
  modified_base 41: mod_base = OTHER; note = 2'-O-methyl ribonucleotide
  modified_base 42: mod_base = OTHER; note = 2'-O-methyl ribonucleotide
  modified_base 46: mod_base = OTHER; note = 2'-O-methyl ribonucleotide
  modified_base 48: mod_base = OTHER; note = 2'-O-methyl ribonucleotide
  modified_base 50: mod_base = OTHER; note = 2'-O-methyl ribonucleotide
  modified_base 52: mod_base = OTHER; note = 2'-O-methyl ribonucleotide
  modified_base 53: mod_base = OTHER; note = 2'-O-methyl ribonucleotide
  modified_base 54: mod_base = OTHER; note = 2'-O-methyl ribonucleotide
  modified_base 57: mod_base = OTHER; note = 2'-O-methyl ribonucleotide
  modified_base 61: mod_base = OTHER; note = 2'-O-methyl ribonucleotide
  modified_base 66: mod_base = OTHER; note = 2'-O-methyl ribonucleotide
  modified_base 67: mod_base = OTHER; note = 2'-O-methyl ribonucleotide
  modified_base 70: mod_base = OTHER; note = 2'-O-methyl ribonucleotide
  modified_base 71: mod_base = OTHER; note = 2'-O-methyl ribonucleotide
  modified_base 72: mod_base = OTHER; note = 2'-O-methyl ribonucleotide
  modified_base 73: mod_base = OTHER; note = 2'-O-methyl ribonucleotide
  modified_base 74: mod_base = OTHER; note = 2'-O-methyl ribonucleotide
  modified_base 75: mod_base = OTHER; note = 2'-O-methyl ribonucleotide
  modified_base 76: mod_base = OTHER; note = 2'-O-methyl ribonucleotide
  modified_base 77: mod_base = OTHER; note = 2'-O-methyl ribonucleotide
  modified_base 78: mod_base = OTHER; note = 2'-O-methyl ribonucleotide
  modified_base 79: mod_base = OTHER; note = 2'-O-methyl ribonucleotide
  modified_base 80: mod_base = OTHER; note = 2'-O-methyl ribonucleotide
  modified_base 82: mod_base = OTHER; note = 2'-O-methyl ribonucleotide
  modified_base 83: mod_base = OTHER; note = 2'-O-methyl ribonucleotide
  modified_base 84: mod_base = OTHER; note = 2'-O-methyl ribonucleotide
  modified_base 85: mod_base = OTHER; note = 2'-O-methyl ribonucleotide
  modified_base 86: mod_base = OTHER; note = 2'-O-methyl ribonucleotide
  modified_base 87: mod_base = OTHER; note = 2'-O-methyl ribonucleotide
  modified_base 89: mod_base = OTHER; note = 2'-O-methyl ribonucleotide
  modified_base 92: mod_base = OTHER; note = 2'-O-methyl ribonucleotide
  modified_base 93: mod_base = OTHER; note = 2'-O-methyl ribonucleotide
  modified_base 94: mod_base = OTHER; note = 2'-O-methyl ribonucleotide
  modified_base 95: mod_base = OTHER; note = 2'-O-methyl ribonucleotide
  modified_base 96: mod_base = OTHER; note = 2'-O-methyl ribonucleotide
  modified_base 97: mod_base = OTHER; note = 2'-O-methyl ribonucleotide
  modified_base 98: mod_base = OTHER; note = 2'-O-methyl ribonucleotide
  modified_base 99: mod_base = OTHER; note = 2'-O-methyl ribonucleotide
  modified_base 100: mod_base = OTHER; note = 2'-O-methyl ribonucleotide
  modified_base 101: mod_base = OTHER; note = uniform ribonucleotides (A, C, G, inosine or U), deoxynucleotides (A, G, C, inosine or T), ribonebularine, 2'-O-methylnebularine or deoxynebularine
  modified_base 102: mod_base = OTHER; note = uniform ribonucleotides (A, C, G, inosine or U), deoxynucleotides (A, G, C, inosine or T), ribonebularine, 2'-O-methylnebularine or deoxynebularine
  modified_base 103: mod_base = OTHER; note = uniform ribonucleotides (A, C, G, inosine or U), deoxynucleotides (A, G, C, inosine or T), ribonebularine, 2'-O-methylnebularine or deoxynebularine
  modified_base 1..4: mod_base = OTHER; note = phosphorothioate linkage
  modified_base 25..26: mod_base = OTHER; note = phosphorothioate linkage
  modified_base 97..100: mod_base = OTHER; note = phosphorothioate linkage
  misc_feature 1..100: note = RNA
  misc_feature 101..103: note = Optionally DNA or RNA

SEQ ID NO: 2839 - DNA, 103 bp, synthetic construct; identical to SEQ ID NO: 1797
  source 1..103: mol_type = other DNA
  modified_base 1: mod_base = OTHER; note = 2'-O-methyl ribonucleotide
  modified_base 2: mod_base = OTHER; note = 2'-O-methyl ribonucleotide
  modified_base 3: mod_base = OTHER; note = 2'-O-methyl ribonucleotide
  modified_base 21: mod_base = OTHER; note = 2'-O-methyl ribonucleotide
  modified_base 28: mod_base = OTHER; note = 2'-O-methyl ribonucleotide
  modified_base 29: mod_base = OTHER; note = 2'-O-methyl ribonucleotide
  modified_base 30: mod_base = OTHER; note = 2'-O-methyl ribonucleotide
  modified_base 31: mod_base = OTHER; note = 2'-O-methyl ribonucleotide
  modified_base 32: mod_base = OTHER; note = 2'-O-methyl ribonucleotide
  modified_base 33: mod_base = OTHER; note = 2'-O-methyl ribonucleotide
  modified_base 34: mod_base = OTHER; note = 2'-O-methyl ribonucleotide
  modified_base 35: mod_base = OTHER; note = 2'-O-methyl ribonucleotide
  modified_base 36: mod_base = OTHER; note = 2'-O-methyl ribonucleotide
  modified_base 37: mod_base = OTHER; note = 2'-O-methyl ribonucleotide
  modified_base 38: mod_base = OTHER; note = 2'-O-methyl ribonucleotide
  modified_base 39: mod_base = OTHER; note = 2'-O-methyl ribonucleotide
  modified_base 40: mod_base = OTHER; note = 2'-O-methyl ribonucleotide
  modified_base 41: mod_base = OTHER; note = 2'-O-methyl ribonucleotide
  modified_base 42: mod_base = OTHER; note = 2'-O-methyl ribonucleotide
  modified_base 46: mod_base = OTHER; note = 2'-O-methyl ribonucleotide
  modified_base 48: mod_base = OTHER; note = 2'-O-methyl ribonucleotide
  modified_base 50: mod_base = OTHER; note = 2'-O-methyl ribonucleotide
  modified_base 52: mod_base = OTHER; note = 2'-O-methyl ribonucleotide
  modified_base 53: mod_base = OTHER; note = 2'-O-methyl ribonucleotide
  modified_base 54: mod_base = OTHER; note = 2'-O-methyl ribonucleotide
  modified_base 57: mod_base = OTHER; note = 2'-O-methyl ribonucleotide
  modified_base 61: mod_base = OTHER; note = 2'-O-methyl ribonucleotide
  modified_base 66: mod_base = OTHER; note = 2'-O-methyl ribonucleotide
  modified_base 67: mod_base = OTHER; note = 2'-O-methyl ribonucleotide
  modified_base 70: mod_base = OTHER; note = 2'-O-methyl ribonucleotide
  modified_base 71: mod_base = OTHER; note = 2'-O-methyl ribonucleotide
  modified_base 72: mod_base = OTHER; note = 2'-O-methyl ribonucleotide
  modified_base 73: mod_base = OTHER; note = 2'-O-methyl ribonucleotide
  modified_base 74: mod_base = OTHER; note = 2'-O-methyl ribonucleotide
  modified_base 75: mod_base = OTHER; note = 2'-O-methyl ribonucleotide
  modified_base 76: mod_base = OTHER; note = 2'-O-methyl ribonucleotide
  modified_base 77: mod_base = OTHER; note = 2'-O-methyl ribonucleotide
  modified_base 78: mod_base = OTHER; note = 2'-O-methyl ribonucleotide
  modified_base 79: mod_base = OTHER; note = 2'-O-methyl ribonucleotide
  modified_base 80: mod_base = OTHER; note = 2'-O-methyl ribonucleotide
  modified_base 82: mod_base = OTHER; note = 2'-O-methyl ribonucleotide
  modified_base 83: mod_base = OTHER; note = 2'-O-methyl ribonucleotide
  modified_base 84: mod_base = OTHER; note = 2'-O-methyl ribonucleotide
  modified_base 85: mod_base = OTHER; note = 2'-O-methyl ribonucleotide
  modified_base 86: mod_base = OTHER; note = 2'-O-methyl ribonucleotide
  modified_base 87: mod_base = OTHER; note = 2'-O-methyl ribonucleotide
  modified_base 89: mod_base = OTHER; note = 2'-O-methyl ribonucleotide
  modified_base 91: mod_base = OTHER; note = 2'-O-methyl ribonucleotide
  modified_base 92: mod_base = OTHER; note = 2'-O-methyl ribonucleotide
  modified_base 93: mod_base = OTHER; note = 2'-O-methyl ribonucleotide
  modified_base 94: mod_base = OTHER; note = 2'-O-methyl ribonucleotide
  modified_base 95: mod_base = OTHER; note = 2'-O-methyl ribonucleotide
  modified_base 96: mod_base = OTHER; note = 2'-O-methyl ribonucleotide
  modified_base 97: mod_base = OTHER; note = 2'-O-methyl ribonucleotide
  modified_base 98: mod_base = OTHER; note = 2'-O-methyl ribonucleotide
  modified_base 99: mod_base = OTHER; note = 2'-O-methyl ribonucleotide
  modified_base 100: mod_base = OTHER; note = 2'-O-methyl ribonucleotide
  modified_base 101: mod_base = OTHER; note = uniform ribonucleotides (A, C, G, inosine or U), deoxynucleotides (A, G, C, inosine or T), ribonebularine, 2'-O-methylnebularine or deoxynebularine
  modified_base 102: mod_base = OTHER; note = uniform ribonucleotides (A, C, G, inosine or U), deoxynucleotides (A, G, C, inosine or T), ribonebularine, 2'-O-methylnebularine or deoxynebularine
  modified_base 103: mod_base = OTHER; note = uniform ribonucleotides (A, C, G, inosine or U), deoxynucleotides (A, G, C, inosine or T), ribonebularine, 2'-O-methylnebularine or deoxynebularine
  modified_base 1..4: mod_base = OTHER; note = phosphorothioate linkage
  modified_base 25..26: mod_base = OTHER; note = phosphorothioate linkage
  modified_base 97..100: mod_base = OTHER; note = phosphorothioate linkage
  misc_feature 1..100: note = RNA
  misc_feature 101..103: note = Optionally DNA or RNA

SEQ ID NO: 2840 - DNA, 103 bp, synthetic construct; identical to SEQ ID NO: 1797
  source 1..103: mol_type = other DNA
  modified_base 1: mod_base = OTHER; note = 2'-O-methyl ribonucleotide
  modified_base 2: mod_base = OTHER; note = 2'-O-methyl ribonucleotide
  modified_base 3: mod_base = OTHER; note = 2'-O-methyl ribonucleotide
  modified_base 21: mod_base = OTHER; note = 2'-O-methyl ribonucleotide
  modified_base 28: mod_base = OTHER; note = 2'-O-methyl ribonucleotide
  modified_base 29: mod_base = OTHER; note = 2'-O-methyl ribonucleotide
  modified_base 30: mod_base = OTHER; note = 2'-O-methyl ribonucleotide
  modified_base 31: mod_base = OTHER; note = 2'-O-methyl ribonucleotide
  modified_base 32: mod_base = OTHER; note = 2'-O-methyl ribonucleotide
  modified_base 34: mod_base = OTHER; note = 2'-O-methyl ribonucleotide
  modified_base 35: mod_base = OTHER; note = 2'-O-methyl ribonucleotide
  modified_base 36: mod_base = OTHER; note = 2'-O-methyl ribonucleotide
  modified_base 37: mod_base = OTHER; note = 2'-O-methyl ribonucleotide
  modified_base 38: mod_base = OTHER; note = 2'-O-methyl ribonucleotide
  modified_base 39: mod_base = OTHER; note = 2'-O-methyl ribonucleotide
  modified_base 40: mod_base = OTHER; note = 2'-O-methyl ribonucleotide
  modified_base 41: mod_base = OTHER; note = 2'-O-methyl ribonucleotide
  modified_base 42: mod_base = OTHER; note = 2'-O-methyl ribonucleotide
  modified_base 46: mod_base = OTHER; note = 2'-O-methyl ribonucleotide
  modified_base 48: mod_base = OTHER; note = 2'-O-methyl ribonucleotide
  modified_base 50: mod_base = OTHER; note = 2'-O-methyl ribonucleotide
  modified_base 52: mod_base = OTHER; note = 2'-O-methyl ribonucleotide
  modified_base 53: mod_base = OTHER; note = 2'-O-methyl ribonucleotide
  modified_base 54: mod_base = OTHER; note = 2'-O-methyl ribonucleotide
  modified_base 57: mod_base = OTHER; note = 2'-O-methyl ribonucleotide
  modified_base 61: mod_base = OTHER; note = 2'-O-methyl ribonucleotide
  modified_base 66: mod_base = OTHER; note = 2'-O-methyl ribonucleotide
  modified_base 67: mod_base = OTHER; note = 2'-O-methyl ribonucleotide
  modified_base 70: mod_base = OTHER; note = 2'-O-methyl ribonucleotide
  modified_base 71: mod_base = OTHER; note = 2'-O-methyl ribonucleotide
  modified_base 72: mod_base = OTHER; note = 2'-O-methyl ribonucleotide
  modified_base 73: mod_base = OTHER; note = 2'-O-methyl ribonucleotide
  modified_base 74: mod_base = OTHER; note = 2'-O-methyl ribonucleotide
  modified_base 75: mod_base = OTHER; note = 2'-O-methyl ribonucleotide
  modified_base 76: mod_base = OTHER; note = 2'-O-methyl ribonucleotide
  modified_base 77: mod_base = OTHER; note = 2'-O-methyl ribonucleotide
  modified_base 78: mod_base = OTHER; note = 2'-O-methyl ribonucleotide
  modified_base 79: mod_base = OTHER; note = 2'-O-methyl ribonucleotide
  modified_base 80: mod_base = OTHER; note = 2'-O-methyl ribonucleotide
  modified_base 82: mod_base = OTHER; note = 2'-O-methyl ribonucleotide
  modified_base 83: mod_base = OTHER; note = 2'-O-methyl ribonucleotide
  modified_base 84: mod_base = OTHER; note = 2'-O-methyl ribonucleotide
  modified_base 85: mod_base = OTHER; note = 2'-O-methyl ribonucleotide
  modified_base 86: mod_base = OTHER; note = 2'-O-methyl ribonucleotide
  modified_base 87: mod_base = OTHER; note = 2'-O-methyl ribonucleotide
  modified_base 89: mod_base = OTHER; note = 2'-O-methyl ribonucleotide
  modified_base 92: mod_base = OTHER; note = 2'-O-methyl ribonucleotide
  modified_base 93: mod_base = OTHER; note = 2'-O-methyl ribonucleotide
  modified_base 94: mod_base = OTHER; note = 2'-O-methyl ribonucleotide
  modified_base 95: mod_base = OTHER; note = 2'-O-methyl ribonucleotide
  modified_base 96: mod_base = OTHER; note = 2'-O-methyl ribonucleotide
  modified_base 97: mod_base = OTHER; note = 2'-O-methyl ribonucleotide
  modified_base 98: mod_base = OTHER; note = 2'-O-methyl ribonucleotide
  modified_base 99: mod_base = OTHER; note = 2'-O-methyl ribonucleotide
  modified_base 100: mod_base = OTHER; note = 2'-O-methyl ribonucleotide
  modified_base 101: mod_base = OTHER; note = uniform ribonucleotides (A, C, G, inosine or U), deoxynucleotides (A, G, C, inosine or T), ribonebularine, 2'-O-methylnebularine or deoxynebularine
  modified_base 102: mod_base = OTHER; note = uniform ribonucleotides (A, C, G, inosine or U), deoxynucleotides (A, G, C, inosine or T), ribonebularine, 2'-O-methylnebularine or deoxynebularine
  modified_base 103: mod_base = OTHER; note = uniform ribonucleotides (A, C, G, inosine or U), deoxynucleotides (A, G, C, inosine or T), ribonebularine, 2'-O-methylnebularine or deoxynebularine
  modified_base 1..4: mod_base = OTHER; note = phosphorothioate linkage
  modified_base 25..26: mod_base = OTHER; note = phosphorothioate linkage
  modified_base 97..100: mod_base = OTHER; note = phosphorothioate linkage
  misc_feature 1..100: note = RNA
  misc_feature 101..103: note = Optionally DNA or RNA

SEQ ID NO: 2841 - DNA, 103 bp, synthetic construct; identical to SEQ ID NO: 1797
  source 1..103: mol_type = other DNA
  modified_base 1: mod_base = OTHER; note = 2'-O-methyl ribonucleotide
  modified_base 2: mod_base = OTHER; note = 2'-O-methyl ribonucleotide
  modified_base 3: mod_base = OTHER; note = 2'-O-methyl ribonucleotide
  modified_base 21: mod_base = OTHER; note = 2'-O-methyl ribonucleotide
  modified_base 28: mod_base = OTHER; note = 2'-O-methyl ribonucleotide
  modified_base 29: mod_base = OTHER; note = 2'-O-methyl ribonucleotide
  modified_base 30: mod_base = OTHER; note = 2'-O-methyl ribonucleotide
  modified_base 31: mod_base = OTHER; note = 2'-O-methyl ribonucleotide
  modified_base 32: mod_base = OTHER; note = 2'-O-methyl ribonucleotide
  modified_base 34: mod_base = OTHER; note = 2'-O-methyl ribonucleotide
  modified_base 35: mod_base = OTHER; note = 2'-O-methyl ribonucleotide
  modified_base 36: mod_base = OTHER; note = 2'-O-methyl ribonucleotide
  modified_base 37: mod_base = OTHER; note = 2'-O-methyl ribonucleotide
  modified_base 38: mod_base = OTHER; note = 2'-O-methyl ribonucleotide
  modified_base 39: mod_base = OTHER; note = 2'-O-methyl ribonucleotide
  modified_base 40: mod_base = OTHER; note = 2'-O-methyl ribonucleotide
  modified_base 41: mod_base = OTHER; note = 2'-O-methyl ribonucleotide
  modified_base 42: mod_base = OTHER; note = 2'-O-methyl ribonucleotide
  modified_base 46: mod_base = OTHER; note = 2'-O-methyl ribonucleotide
  modified_base 48: mod_base = OTHER; note = 2'-O-methyl ribonucleotide
  modified_base 50: mod_base = OTHER; note = 2'-O-methyl ribonucleotide
  modified_base 52: mod_base = OTHER; note = 2'-O-methyl ribonucleotide
  modified_base 53: mod_base = OTHER; note = 2'-O-methyl ribonucleotide
  modified_base 54: mod_base = OTHER; note = 2'-O-methyl ribonucleotide
  modified_base 57: mod_base = OTHER; note = 2'-O-methyl ribonucleotide
  modified_base 61: mod_base = OTHER; note = 2'-O-methyl ribonucleotide
  modified_base 66: mod_base = OTHER; note = 2'-O-methyl ribonucleotide
  modified_base 67: mod_base = OTHER; note = 2'-O-methyl ribonucleotide
  modified_base 70: mod_base = OTHER; note = 2'-O-methyl ribonucleotide
  modified_base 71: mod_base = OTHER; note = 2'-O-methyl ribonucleotide
  modified_base 72: mod_base = OTHER; note = 2'-O-methyl ribonucleotide
  modified_base 73: mod_base = OTHER; note = 2'-O-methyl ribonucleotide
  modified_base 74: mod_base = OTHER; note = 2'-O-methyl ribonucleotide
  modified_base 75: mod_base = OTHER; note = 2'-O-methyl ribonucleotide
  modified_base 76: mod_base = OTHER; note = 2'-O-methyl ribonucleotide
  modified_base 77: mod_base = OTHER; note = 2'-O-methyl ribonucleotide
  modified_base 78: mod_base = OTHER; note = 2'-O-methyl ribonucleotide
  modified_base 79: mod_base = OTHER; note = 2'-O-methyl ribonucleotide
  modified_base 80: mod_base = OTHER; note = 2'-O-methyl ribonucleotide
  modified_base 82: mod_base = OTHER; note = 2'-O-methyl ribonucleotide
  modified_base 83: mod_base = OTHER; note = 2'-O-methyl ribonucleotide
  modified_base 84: mod_base = OTHER; note = 2'-O-methyl ribonucleotide
  modified_base 85: mod_base = OTHER; note = 2'-O-methyl ribonucleotide
  modified_base 86: mod_base = OTHER; note = 2'-O-methyl ribonucleotide
  modified_base 87: mod_base = OTHER; note = 2'-O-methyl ribonucleotide
  modified_base 89: mod_base = OTHER; note = 2'-O-methyl ribonucleotide
  modified_base 91: mod_base = OTHER; note = 2'-O-methyl ribonucleotide
  modified_base 92: mod_base = OTHER; note = 2'-O-methyl ribonucleotide
  modified_base 93: mod_base = OTHER; note = 2'-O-methyl ribonucleotide
  modified_base 94: mod_base = OTHER; note = 2'-O-methyl ribonucleotide
  modified_base 95: mod_base = OTHER; note = 2'-O-methyl ribonucleotide
  modified_base 96: mod_base = OTHER; note = 2'-O-methyl ribonucleotide
  modified_base 97: mod_base = OTHER; note = 2'-O-methyl ribonucleotide
  modified_base 98: mod_base = OTHER; note = 2'-O-methyl ribonucleotide
  modified_base 99: mod_base = OTHER; note = 2'-O-methyl ribonucleotide
  modified_base 100: mod_base = OTHER; note = 2'-O-methyl ribonucleotide
  modified_base 101: mod_base = OTHER; note = uniform ribonucleotides (A, C, G, inosine or U), deoxynucleotides (A, G, C, inosine or T), ribonebularine, 2'-O-methylnebularine or deoxynebularine
  modified_base 102: mod_base = OTHER; note = uniform ribonucleotides (A, C, G, inosine or U), deoxynucleotides (A, G, C, inosine or T), ribonebularine, 2'-O-methylnebularine or deoxynebularine
  modified_base 103: mod_base = OTHER; note = uniform ribonucleotides (A, C, G, inosine or U), deoxynucleotides (A, G, C, inosine or T), ribonebularine, 2'-O-methylnebularine or deoxynebularine
  modified_base 1..4: mod_base = OTHER; note = phosphorothioate linkage
  modified_base 25..26: mod_base = OTHER; note = phosphorothioate linkage
  modified_base 97..100: mod_base = OTHER; note = phosphorothioate linkage
  misc_feature 1..100: note = RNA
  misc_feature 101..103: note = Optionally DNA or RNA

SEQ ID NO: 2842 - DNA, 103 bp, synthetic construct; identical to SEQ ID NO: 1797
  source 1..103: mol_type = other DNA
  modified_base 1: mod_base = OTHER; note = 2'-O-methyl ribonucleotide
  modified_base 2: mod_base = OTHER; note = 2'-O-methyl ribonucleotide
  modified_base 3: mod_base = OTHER; note = 2'-O-methyl ribonucleotide
  modified_base 21: mod_base = OTHER; note = 2'-O-methyl ribonucleotide
  modified_base 28: mod_base = OTHER; note = 2'-O-methyl ribonucleotide
  modified_base 29: mod_base = OTHER; note = 2'-O-methyl ribonucleotide
  modified_base 30: mod_base = OTHER; note = 2'-O-methyl ribonucleotide
  modified_base 31: mod_base = OTHER; note = 2'-O-methyl ribonucleotide
  modified_base 32: mod_base = OTHER; note = 2'-O-methyl ribonucleotide
  modified_base 34: mod_base = OTHER; note = 2'-O-methyl ribonucleotide
  modified_base 35: mod_base = OTHER; note = 2'-O-methyl ribonucleotide
  modified_base 36: mod_base = OTHER; note = 2'-O-methyl ribonucleotide
  modified_base 37: mod_base = OTHER; note = 2'-O-methyl ribonucleotide
  modified_base 38: mod_base = OTHER; note = 2'-O-methyl ribonucleotide
  modified_base 39: mod_base = OTHER; note = 2'-O-methyl ribonucleotide
  modified_base 40: mod_base = OTHER; note = 2'-O-methyl ribonucleotide
  modified_base 41: mod_base = OTHER; note = 2'-O-methyl ribonucleotide
  modified_base 42: mod_base = OTHER; note = 2'-O-methyl ribonucleotide
  modified_base 46: mod_base = OTHER; note = 2'-O-methyl ribonucleotide
  modified_base 48: mod_base = OTHER; note = 2'-O-methyl ribonucleotide
  modified_base 50: mod_base = OTHER; note = 2'-O-methyl ribonucleotide
  modified_base 52: mod_base = OTHER; note = 2'-O-methyl ribonucleotide
  modified_base 53: mod_base = OTHER; note = 2'-O-methyl ribonucleotide
  modified_base 54: mod_base = OTHER; note = 2'-O-methyl ribonucleotide
  modified_base 55: mod_base = OTHER; note = 2'-O-methyl ribonucleotide
  modified_base 56: mod_base = OTHER; note = 2'-O-methyl ribonucleotide
  modified_base 57: mod_base = OTHER; note = 2'-O-methyl ribonucleotide
  modified_base 60: mod_base = OTHER; note = 2'-O-methyl ribonucleotide
  modified_base 61: mod_base = OTHER; note = 2'-O-methyl ribonucleotide
  modified_base 66: mod_base = OTHER; note = 2'-O-methyl ribonucleotide
  modified_base 67: mod_base = OTHER; note = 2'-O-methyl ribonucleotide
  modified_base 70: mod_base = OTHER; note = 2'-O-methyl ribonucleotide
  modified_base 71: mod_base = OTHER; note = 2'-O-methyl ribonucleotide
  modified_base 72: mod_base = OTHER; note = 2'-O-methyl ribonucleotide
  modified_base 74: mod_base = OTHER; note = 2'-O-methyl ribonucleotide
  modified_base 75: mod_base = OTHER; note = 2'-O-methyl ribonucleotide
  modified_base 76: mod_base = OTHER; note = 2'-O-methyl ribonucleotide
  modified_base 77: mod_base = OTHER; note = 2'-O-methyl ribonucleotide
  modified_base 78: mod_base = OTHER; note = 2'-O-methyl ribonucleotide
  modified_base 79: mod_base = OTHER; note = 2'-O-methyl ribonucleotide
  modified_base 80: mod_base = OTHER; note = 2'-O-methyl ribonucleotide
  modified_base 82: mod_base = OTHER; note = 2'-O-methyl ribonucleotide
  modified_base 83: mod_base = OTHER; note = 2'-O-methyl ribonucleotide
  modified_base 84: mod_base = OTHER; note = 2'-O-methyl ribonucleotide
  modified_base 85: mod_base = OTHER; note = 2'-O-methyl ribonucleotide
  modified_base 86: mod_base = OTHER; note = 2'-O-methyl ribonucleotide
  modified_base 87: mod_base = OTHER; note = 2'-O-methyl ribonucleotide
  modified_base 89: mod_base = OTHER; note = 2'-O-methyl ribonucleotide
  modified_base 92: mod_base = OTHER; note = 2'-O-methyl ribonucleotide
  modified_base 93: mod_base = OTHER; note = 2'-O-methyl ribonucleotide
  modified_base 94: mod_base = OTHER; note = 2'-O-methyl ribonucleotide
  modified_base 95: mod_base = OTHER; note = 2'-O-methyl ribonucleotide
  modified_base 96: mod_base = OTHER; note = 2'-O-methyl ribonucleotide
  modified_base 97: mod_base = OTHER; note = 2'-O-methyl ribonucleotide
  modified_base 98: mod_base = OTHER; note = 2'-O-methyl ribonucleotide
  modified_base 99: mod_base = OTHER; note = 2'-O-methyl ribonucleotide
  modified_base 100: mod_base = OTHER; note = 2'-O-methyl ribonucleotide
  modified_base 101: mod_base = OTHER; note = uniform ribonucleotides (A, C, G, inosine or U), deoxynucleotides (A, G, C, inosine or T), ribonebularine, 2'-O-methylnebularine or deoxynebularine
  modified_base 102: mod_base = OTHER; note = uniform ribonucleotides (A, C, G, inosine or U), deoxynucleotides (A, G, C, inosine or T), ribonebularine, 2'-O-methylnebularine or deoxynebularine
  modified_base 103: mod_base = OTHER; note = uniform ribonucleotides (A, C, G, inosine or U), deoxynucleotides (A, G, C, inosine or T), ribonebularine, 2'-O-methylnebularine or deoxynebularine
  modified_base 1..4: mod_base = OTHER; note = phosphorothioate linkage
  modified_base 25..26: mod_base = OTHER; note = phosphorothioate linkage
  modified_base 97..100: mod_base = OTHER; note = phosphorothioate linkage
  misc_feature 1..100: note = RNA
  misc_feature 101..103: note = Optionally DNA or RNA

SEQ ID NO: 2843 - DNA, 103 bp, synthetic construct; identical to SEQ ID NO: 1795
  source 1..103: mol_type = other DNA
  modified_base 1: mod_base = OTHER; note = 2'-O-methyl ribonucleotide
  modified_base 2: mod_base = OTHER; note = 2'-O-methyl ribonucleotide
  modified_base 3: mod_base = OTHER; note = 2'-O-methyl ribonucleotide
  modified_base 21: mod_base = OTHER; note = 2'-O-methyl ribonucleotide
  modified_base 28: mod_base = OTHER; note = 2'-O-methyl ribonucleotide
  modified_base 29: mod_base = OTHER; note = 2'-O-methyl ribonucleotide
  modified_base 30: mod_base = OTHER; note = 2'-O-methyl ribonucleotide
  modified_base 31: mod_base = OTHER; note = 2'-O-methyl ribonucleotide
  modified_base 32: mod_base = OTHER; note = 2'-O-methyl ribonucleotide
  modified_base 33: mod_base = OTHER; note = 2'-O-methyl ribonucleotide
  modified_base 34: mod_base = OTHER; note = 2'-O-methyl ribonucleotide
  modified_base 35: mod_base = OTHER; note = 2'-O-methyl ribonucleotide
  modified_base 36: mod_base = OTHER; note = 2'-O-methyl ribonucleotide
  modified_base 37: mod_base = OTHER; note = 2'-O-methyl ribonucleotide
  modified_base 38: mod_base = OTHER; note = 2'-O-methyl ribonucleotide
  modified_base 39: mod_base = OTHER; note = 2'-O-methyl ribonucleotide
  modified_base 40: mod_base = OTHER; note = 2'-O-methyl ribonucleotide
  modified_base 41: mod_base = OTHER; note = 2'-O-methyl ribonucleotide
  modified_base 42: mod_base = OTHER; note = 2'-O-methyl ribonucleotide
  modified_base 46: mod_base = OTHER; note = 2'-O-methyl ribonucleotide
  modified_base 48: mod_base = OTHER; note = 2'-O-methyl ribonucleotide
  modified_base 50: mod_base = OTHER; note = 2'-O-methyl ribonucleotide
  modified_base 52: mod_base = OTHER; note = 2'-O-methyl ribonucleotide
  modified_base 53: mod_base = OTHER; note = 2'-O-methyl ribonucleotide
  modified_base 54: mod_base = OTHER; note = 2'-O-methyl ribonucleotide
  modified_base 55: mod_base = OTHER; note = 2'-O-methyl ribonucleotide
  modified_base 56: mod_base = OTHER; note = 2'-O-methyl ribonucleotide
  modified_base 57: mod_base = OTHER; note = 2'-O-methyl ribonucleotide
  modified_base 60: mod_base = OTHER; note = 2'-O-methyl ribonucleotide
  modified_base 61: mod_base = OTHER; note = 2'-O-methyl ribonucleotide
  modified_base 66: mod_base = OTHER; note = 2'-O-methyl ribonucleotide
  modified_base 67: mod_base = OTHER; note = 2'-O-methyl ribonucleotide
  modified_base 70: mod_base = OTHER; note = 2'-O-methyl ribonucleotide
  modified_base 71: mod_base = OTHER; note = 2'-O-methyl ribonucleotide
  modified_base 72: mod_base = OTHER; note = 2'-O-methyl ribonucleotide
  modified_base 73: mod_base = OTHER; note = 2'-O-methyl ribonucleotide
  modified_base 74: mod_base = OTHER; note = 2'-O-methyl ribonucleotide
  modified_base 75: mod_base = OTHER; note = 2'-O-methyl ribonucleotide
  modified_base 76: mod_base = OTHER; note = 2'-O-methyl ribonucleotide
  modified_base 77: mod_base = OTHER; note = 2'-O-methyl ribonucleotide
  modified_base 78: mod_base = OTHER; note = 2'-O-methyl ribonucleotide
  modified_base 79: mod_base = OTHER; note = 2'-O-methyl ribonucleotide
  modified_base 80: mod_base = OTHER; note = 2'-O-methyl ribonucleotide
  modified_base 81: mod_base = OTHER; note = 2'-O-methyl ribonucleotide
  modified_base 83: mod_base = OTHER; note = 2'-O-methyl ribonucleotide
  modified_base 84: mod_base = OTHER; note = 2'-O-methyl ribonucleotide
  modified_base 85: mod_base = OTHER; note = 2'-O-methyl ribonucleotide
  modified_base 86: mod_base = OTHER; note = 2'-O-methyl ribonucleotide
  modified_base 87: mod_base = OTHER; note = 2'-O-methyl ribonucleotide
  modified_base 88: mod_base = OTHER; note = 2'-O-methyl ribonucleotide
  modified_base 89: mod_base = OTHER; note = 2'-O-methyl ribonucleotide
  modified_base 90: mod_base = OTHER; note = 2'-O-methyl ribonucleotide
  modified_base 91: mod_base = OTHER; note = 2'-O-methyl ribonucleotide
  modified_base 92: mod_base = OTHER; note = 2'-O-methyl ribonucleotide
  modified_base 93: mod_base = OTHER; note = 2'-O-methyl ribonucleotide
  modified_base 94: mod_base = OTHER; note = 2'-O-methyl ribonucleotide
  modified_base 95: mod_base = OTHER; note = 2'-O-methyl ribonucleotide
  modified_base 96: mod_base = OTHER; note = 2'-O-methyl ribonucleotide
  modified_base 97: mod_base = OTHER; note = 2'-O-methyl ribonucleotide
  modified_base 98: mod_base = OTHER; note = 2'-O-methyl ribonucleotide
  modified_base 99: mod_base = OTHER; note = 2'-O-methyl ribonucleotide
  modified_base 100: mod_base = OTHER; note = 2'-O-methyl ribonucleotide
  modified_base 101: mod_base = OTHER; note = uniform ribonucleotides (A, C, G, inosine or U), deoxynucleotides (A, G, C, inosine or T), ribonebularine, 2'-O-methylnebularine or deoxynebularine
  modified_base 102: mod_base = OTHER; note = uniform ribonucleotides (A, C, G, inosine or U), deoxynucleotides (A, G, C, inosine or T), ribonebularine, 2'-O-methylnebularine or deoxynebularine
  modified_base 103: mod_base = OTHER; note = uniform ribonucleotides (A, C, G, inosine or U), deoxynucleotides (A, G, C, inosine or T), ribonebularine, 2'-O-methylnebularine or deoxynebularine
  modified_base 1..4: mod_base = OTHER; note = phosphorothioate linkage
  modified_base 45..46: mod_base = OTHER; note = phosphorothioate linkage
  modified_base 64..65: mod_base = OTHER; note = phosphorothioate linkage
  modified_base 97..100: mod_base = OTHER; note = phosphorothioate linkage
  misc_feature 1..100: note = RNA
  misc_feature 101..103: note = Optionally DNA or RNA

SEQ ID NO: 2844 - DNA, 103 bp, synthetic construct; identical to SEQ ID NO: 1795
  source 1..103: mol_type = other DNA
  modified_base 1: mod_base = OTHER; note = 2'-O-methyl ribonucleotide
  modified_base 2: mod_base = OTHER; note = 2'-O-methyl ribonucleotide
  modified_base 3: mod_base = OTHER; note = 2'-O-methyl ribonucleotide
  modified_base 21: mod_base = OTHER; note = 2'-O-methyl ribonucleotide
  modified_base 28: mod_base = OTHER; note = 2'-O-methyl ribonucleotide
  modified_base 29: mod_base = OTHER; note = 2'-O-methyl ribonucleotide
  modified_base 30: mod_base = OTHER; note = 2'-O-methyl ribonucleotide
  modified_base 31: mod_base = OTHER; note = 2'-O-methyl ribonucleotide
  modified_base 32: mod_base = OTHER; note = 2'-O-methyl ribonucleotide
  modified_base 34: mod_base = OTHER; note = 2'-O-methyl ribonucleotide
  modified_base 35: mod_base = OTHER; note = 2'-O-methyl ribonucleotide
  modified_base 36: mod_base = OTHER; note = 2'-O-methyl ribonucleotide
  modified_base 37: mod_base = OTHER; note = 2'-O-methyl ribonucleotide
  modified_base 38: mod_base = OTHER; note = 2'-O-methyl ribonucleotide
  modified_base 39: mod_base = OTHER; note = 2'-O-methyl ribonucleotide
  modified_base 40: mod_base = OTHER; note = 2'-O-methyl ribonucleotide
  modified_base 41: mod_base = OTHER; note = 2'-O-methyl ribonucleotide
  modified_base 42: mod_base = OTHER; note = 2'-O-methyl ribonucleotide
  modified_base 46: mod_base = OTHER; note = 2'-O-methyl ribonucleotide
  modified_base 48: mod_base = OTHER; note = 2'-O-methyl ribonucleotide
  modified_base 50: mod_base = OTHER; note = 2'-O-methyl ribonucleotide
  modified_base 52: mod_base = OTHER; note = 2'-O-methyl ribonucleotide
  modified_base 53: mod_base = OTHER; note = 2'-O-methyl ribonucleotide
  modified_base 54: mod_base = OTHER; note = 2'-O-methyl ribonucleotide
  modified_base 55: mod_base = OTHER; note = 2'-O-methyl ribonucleotide
  modified_base 56: mod_base = OTHER; note = 2'-O-methyl ribonucleotide
  modified_base 57: mod_base = OTHER; note = 2'-O-methyl ribonucleotide
  modified_base 60: mod_base = OTHER; note = 2'-O-methyl ribonucleotide
  modified_base 61: mod_base = OTHER; note = 2'-O-methyl ribonucleotide
  modified_base 66: mod_base = OTHER; note = 2'-O-methyl ribonucleotide
  modified_base 67: mod_base = OTHER; note = 2'-O-methyl ribonucleotide
  modified_base 70: mod_base = OTHER; note = 2'-O-methyl ribonucleotide
  modified_base 71: mod_base = OTHER; note = 2'-O-methyl ribonucleotide
  modified_base 72: mod_base = OTHER; note = 2'-O-methyl ribonucleotide
  modified_base 74: mod_base = OTHER; note = 2'-O-methyl ribonucleotide
  modified_base 75: mod_base = OTHER; note = 2'-O-methyl ribonucleotide
  modified_base 76: mod_base = OTHER; note = 2'-O-methyl ribonucleotide
  modified_base 77: mod_base = OTHER; note = 2'-O-methyl ribonucleotide
  modified_base 78: mod_base = OTHER; note = 2'-O-methyl ribonucleotide
  modified_base 79: mod_base = OTHER; note = 2'-O-methyl ribonucleotide
  modified_base 80: mod_base = OTHER; note = 2'-O-methyl ribonucleotide
  modified_base 81: mod_base = OTHER; note = 2'-O-methyl ribonucleotide
  modified_base 83: mod_base = OTHER; note = 2'-O-methyl ribonucleotide
  modified_base 84: mod_base = OTHER; note = 2'-O-methyl ribonucleotide
  modified_base 85: mod_base = OTHER; note = 2'-O-methyl ribonucleotide
  modified_base 86: mod_base = OTHER; note = 2'-O-methyl ribonucleotide
  modified_base 87: mod_base = OTHER; note = 2'-O-methyl ribonucleotide
  modified_base 88: mod_base = OTHER; note = 2'-O-methyl ribonucleotide
  modified_base 89: mod_base = OTHER; note = 2'-O-methyl ribonucleotide
  modified_base 90: mod_base = OTHER; note = 2'-O-methyl ribonucleotide
  modified_base 91: mod_base = OTHER; note = 2'-O-methyl ribonucleotide
  modified_base 92: mod_base = OTHER; note = 2'-O-methyl ribonucleotide
  modified_base 93: mod_base = OTHER; note = 2'-O-methyl ribonucleotide
  modified_base 94: mod_base = OTHER; note = 2'-O-methyl ribonucleotide
  modified_base 95: mod_base = OTHER; note = 2'-O-methyl ribonucleotide
  modified_base 96: mod_base = OTHER; note = 2'-O-methyl ribonucleotide
  modified_base 97: mod_base = OTHER; note = 2'-O-methyl ribonucleotide
  modified_base 98: mod_base = OTHER; note = 2'-O-methyl ribonucleotide
  modified_base 99: mod_base = OTHER; note = 2'-O-methyl ribonucleotide
  modified_base 100: mod_base = OTHER; note = 2'-O-methyl ribonucleotide
  modified_base 101: mod_base = OTHER; note = uniform ribonucleotides (A, C, G, inosine or U), deoxynucleotides (A, G, C, inosine or T), ribonebularine, 2'-O-methylnebularine or deoxynebularine
  modified_base 102: mod_base = OTHER; note = uniform ribonucleotides (A, C, G, inosine or U), deoxynucleotides (A, G, C, inosine or T), ribonebularine, 2'-O-methylnebularine or deoxynebularine
  modified_base 103: mod_base = OTHER; note = uniform ribonucleotides (A, C, G, inosine or U), deoxynucleotides (A, G, C, inosine or T), ribonebularine, 2'-O-methylnebularine or deoxynebularine
  modified_base 1..4: mod_base = OTHER; note = phosphorothioate linkage
  modified_base 45..46: mod_base = OTHER; note = phosphorothioate linkage
  modified_base 64..65: mod_base = OTHER; note = phosphorothioate linkage
  modified_base 97..100: mod_base = OTHER; note = phosphorothioate linkage
  misc_feature 1..100: note = RNA
  misc_feature 101..103: note = Optionally DNA or RNA

SEQ ID NO: 2845 - DNA, 103 bp, synthetic construct; identical to SEQ ID NO: 1796
  source 1..103: mol_type = other DNA
  modified_base 1: mod_base = OTHER; note = 2'-O-methyl ribonucleotide
  modified_base 2: mod_base = OTHER; note = 2'-O-methyl ribonucleotide
  modified_base 3: mod_base = OTHER; note = 2'-O-methyl ribonucleotide
  modified_base 21: mod_base = OTHER; note = 2'-O-methyl ribonucleotide
  modified_base 28: mod_base = OTHER; note = 2'-O-methyl ribonucleotide
  modified_base 29: mod_base = OTHER; note = 2'-O-methyl ribonucleotide
  modified_base 30: mod_base = OTHER; note = 2'-O-methyl ribonucleotide
  modified_base 31: mod_base = OTHER; note = 2'-O-methyl ribonucleotide
  modified_base 32: mod_base = OTHER; note = 2'-O-methyl ribonucleotide
  modified_base 33: mod_base = OTHER; note = 2'-O-methyl ribonucleotide
  modified_base 34: mod_base = OTHER; note = 2'-O-methyl ribonucleotide
  modified_base 35: mod_base = OTHER; note = 2'-O-methyl ribonucleotide
  modified_base 36: mod_base = OTHER; note = 2'-O-methyl ribonucleotide
  modified_base 37: mod_base = OTHER; note = 2'-O-methyl ribonucleotide
  modified_base 38: mod_base = OTHER; note = 2'-O-methyl ribonucleotide
  modified_base 39: mod_base = OTHER; note = 2'-O-methyl ribonucleotide
  modified_base 40: mod_base = OTHER; note = 2'-O-methyl ribonucleotide
  modified_base 41: mod_base = OTHER; note = 2'-O-methyl ribonucleotide
  modified_base 42: mod_base = OTHER; note = 2'-O-methyl ribonucleotide
  modified_base 46: mod_base = OTHER; note = 2'-O-methyl ribonucleotide
  modified_base 48: mod_base = OTHER; note = 2'-O-methyl ribonucleotide
  modified_base 50: mod_base = OTHER; note = 2'-O-methyl ribonucleotide
  modified_base 52: mod_base = OTHER; note = 2'-O-methyl ribonucleotide
  modified_base 53: mod_base = OTHER; note = 2'-O-methyl ribonucleotide
  modified_base 54: mod_base = OTHER; note = 2'-O-methyl ribonucleotide
  modified_base 55: mod_base = OTHER; note = 2'-O-methyl ribonucleotide
  modified_base 56: mod_base = OTHER; note = 2'-O-methyl ribonucleotide
  modified_base 57: mod_base = OTHER; note = 2'-O-methyl ribonucleotide
  modified_base 60: mod_base = OTHER; note = 2'-O-methyl ribonucleotide
  modified_base 61: mod_base = OTHER; note = 2'-O-methyl ribonucleotide
  modified_base 66: mod_base = OTHER; note = 2'-O-methyl ribonucleotide
  modified_base 67: mod_base = OTHER; note = 2'-O-methyl ribonucleotide
  modified_base 70: mod_base = OTHER; note = 2'-O-methyl ribonucleotide
  modified_base 71: mod_base = OTHER; note = 2'-O-methyl ribonucleotide
  modified_base 72: mod_base = OTHER; note = 2'-O-methyl ribonucleotide
  modified_base 73: mod_base = OTHER; note = 2'-O-methyl ribonucleotide
  modified_base 74: mod_base = OTHER; note = 2'-O-methyl ribonucleotide
  modified_base 75: mod_base = OTHER; note = 2'-O-methyl ribonucleotide
  modified_base 76: mod_base = OTHER; note = 2'-O-methyl ribonucleotide
  modified_base 77: mod_base = OTHER; note = 2'-O-methyl ribonucleotide
  modified_base 78: mod_base = OTHER; note = 2'-O-methyl ribonucleotide
  modified_base 79: mod_base = OTHER; note = 2'-O-methyl ribonucleotide
  modified_base 80: mod_base = OTHER; note = 2'-O-methyl ribonucleotide
  modified_base 81: mod_base = OTHER; note = 2'-O-methyl ribonucleotide
  modified_base 83: mod_base = OTHER; note = 2'-O-methyl ribonucleotide
  modified_base 84: mod_base = OTHER; note = 2'-O-methyl ribonucleotide
  modified_base 85: mod_base = OTHER; note = 2'-O-methyl ribonucleotide
  modified_base 86: mod_base = OTHER; note = 2'-O-methyl ribonucleotide
  modified_base 87: mod_base = OTHER; note = 2'-O-methyl ribonucleotide
  modified_base 88: mod_base = OTHER; note = 2'-O-methyl ribonucleotide
  modified_base 89: mod_base = OTHER; note = 2'-O-methyl ribonucleotide
  modified_base 90: mod_base = OTHER; note = 2'-O-methyl ribonucleotide
  modified_base 91: mod_base = OTHER; note = 2'-O-methyl ribonucleotide
  modified_base 92: mod_base = OTHER; note = 2'-O-methyl ribonucleotide
  modified_base 93: mod_base = OTHER; note = 2'-O-methyl ribonucleotide
  modified_base 94: mod_base = OTHER; note = 2'-O-methyl ribonucleotide
  modified_base 95: mod_base = OTHER; note = 2'-O-methyl ribonucleotide
  modified_base 96: mod_base = OTHER; note = 2'-O-methyl ribonucleotide
  modified_base 97: mod_base = OTHER; note = 2'-O-methyl ribonucleotide
  modified_base 98: mod_base = OTHER; note = 2'-O-methyl ribonucleotide
  modified_base 99: mod_base = OTHER; note = 2'-O-methyl ribonucleotide
  modified_base 100: mod_base = OTHER; note = 2'-O-methyl ribonucleotide
  modified_base 101: mod_base = OTHER; note = uniform ribonucleotides (A, C, G, inosine or U), deoxynucleotides (A, G, C, inosine or T), ribonebularine, 2'-O-methylnebularine or deoxynebularine
  modified_base 102: mod_base = OTHER; note = uniform ribonucleotides (A, C, G, inosine or U), deoxynucleotides (A, G, C, inosine or T), ribonebularine, 2'-O-methylnebularine or deoxynebularine
  modified_base 103: mod_base = OTHER; note = uniform ribonucleotides (A, C, G, inosine or U), deoxynucleotides (A, G, C, inosine or T), ribonebularine, 2'-O-methylnebularine or deoxynebularine
  modified_base 1..4: mod_base = OTHER; note = phosphorothioate linkage
  modified_base 45..46: mod_base = OTHER; note = phosphorothioate linkage
  modified_base 64..65: mod_base = OTHER; note = phosphorothioate linkage
  modified_base 97..100: mod_base = OTHER; note = phosphorothioate linkage
  misc_feature 1..100: note = RNA
  misc_feature 101..103: note = Optionally DNA or RNA

SEQ ID NO: 2846 - DNA, 103 bp, synthetic construct; identical to SEQ ID NO: 1796
  source 1..103: mol_type = other DNA
  modified_base 1: mod_base = OTHER; note = 2'-O-methyl ribonucleotide
  modified_base 2: mod_base = OTHER; note = 2'-O-methyl ribonucleotide
  modified_base 3: mod_base = OTHER; note = 2'-O-methyl ribonucleotide
  modified_base 21: mod_base = OTHER; note = 2'-O-methyl ribonucleotide
  modified_base 28: mod_base = OTHER; note = 2'-O-methyl ribonucleotide
  modified_base 29: mod_base = OTHER; note = 2'-O-methyl ribonucleotide
  modified_base 30: mod_base = OTHER; note = 2'-O-methyl ribonucleotide
  modified_base 31: mod_base = OTHER; note = 2'-O-methyl ribonucleotide
  modified_base 32: mod_base = OTHER; note = 2'-O-methyl ribonucleotide
  modified_base 34: mod_base = OTHER; note = 2'-O-methyl ribonucleotide
  modified_base 35: mod_base = OTHER; note = 2'-O-methyl ribonucleotide
  modified_base 36: mod_base = OTHER; note = 2'-O-methyl ribonucleotide
  modified_base 37: mod_base = OTHER; note = 2'-O-methyl ribonucleotide
  modified_base 38: mod_base = OTHER; note = 2'-O-methyl ribonucleotide
  modified_base 39: mod_base = OTHER; note = 2'-O-methyl ribonucleotide
  modified_base 40: mod_base = OTHER; note = 2'-O-methyl ribonucleotide
  modified_base 41: mod_base = OTHER; note = 2'-O-methyl ribonucleotide
  modified_base 42: mod_base = OTHER; note = 2'-O-methyl ribonucleotide
  modified_base 46: mod_base = OTHER; note = 2'-O-methyl ribonucleotide
  modified_base 48: mod_base = OTHER; note = 2'-O-methyl ribonucleotide
  modified_base 50: mod_base = OTHER; note = 2'-O-methyl ribonucleotide
  modified_base 52: mod_base = OTHER; note = 2'-O-methyl ribonucleotide
  modified_base 53: mod_base = OTHER; note = 2'-O-methyl ribonucleotide
  modified_base 54: mod_base = OTHER; note = 2'-O-methyl ribonucleotide
  modified_base 55: mod_base = OTHER; note = 2'-O-methyl ribonucleotide
  modified_base 56: mod_base = OTHER; note = 2'-O-methyl ribonucleotide
  modified_base 57: mod_base = OTHER; note = 2'-O-methyl ribonucleotide
  modified_base 60: mod_base = OTHER; note = 2'-O-methyl ribonucleotide
  modified_base 61: mod_base = OTHER; note = 2'-O-methyl ribonucleotide
  modified_base 66: mod_base = OTHER; note = 2'-O-methyl ribonucleotide
  modified_base 67: mod_base = OTHER; note = 2'-O-methyl ribonucleotide
  modified_base 70: mod_base = OTHER; note = 2'-O-methyl ribonucleotide
  modified_base 71: mod_base = OTHER; note = 2'-O-methyl ribonucleotide
  modified_base 72: mod_base = OTHER; note = 2'-O-methyl ribonucleotide
  modified_base 74: mod_base = OTHER; note = 2'-O-methyl ribonucleotide
  modified_base 75: mod_base = OTHER; note = 2'-O-methyl ribonucleotide
  modified_base 76: mod_base = OTHER; note = 2'-O-methyl ribonucleotide
  modified_base 77: mod_base = OTHER; note = 2'-O-methyl ribonucleotide
  modified_base 78: mod_base = OTHER; note = 2'-O-methyl ribonucleotide
  modified_base 79: mod_base = OTHER; note = 2'-O-methyl ribonucleotide
  modified_base 80: mod_base = OTHER; note = 2'-O-methyl ribonucleotide
  modified_base 81: mod_base = OTHER; note = 2'-O-methyl ribonucleotide
  modified_base 83: mod_base = OTHER; note = 2'-O-methyl ribonucleotide
  modified_base 84: mod_base = OTHER; note = 2'-O-methyl ribonucleotide
  modified_base 85: mod_base = OTHER; note = 2'-O-methyl ribonucleotide
  modified_base 86: mod_base = OTHER; note = 2'-O-methyl ribonucleotide
  modified_base 87: mod_base = OTHER; note = 2'-O-methyl ribonucleotide
  modified_base 88: mod_base = OTHER; note = 2'-O-methyl ribonucleotide
  modified_base 89: mod_base = OTHER; note = 2'-O-methyl ribonucleotide
  modified_base 90: mod_base = OTHER; note = 2'-O-methyl ribonucleotide
  modified_base 91: mod_base = OTHER; note = 2'-O-methyl ribonucleotide
  modified_base 92: mod_base = OTHER; note = 2'-O-methyl ribonucleotide
  modified_base 93: mod_base = OTHER; note = 2'-O-methyl ribonucleotide
  modified_base 94: mod_base = OTHER; note = 2'-O-methyl ribonucleotide
  modified_base 95: mod_base = OTHER; note = 2'-O-methyl ribonucleotide
  modified_base 96: mod_base = OTHER; note = 2'-O-methyl ribonucleotide
  modified_base 97: mod_base = OTHER; note = 2'-O-methyl ribonucleotide
  modified_base 98: mod_base = OTHER; note = 2'-O-methyl ribonucleotide
  modified_base 99: mod_base = OTHER; note = 2'-O-methyl ribonucleotide
  modified_base 100: mod_base = OTHER; note = 2'-O-methyl ribonucleotide
  modified_base 101: mod_base = OTHER; note = uniform ribonucleotides (A, C, G, inosine or U), deoxynucleotides (A, G, C, inosine or T), ribonebularine, 2'-O-methylnebularine or deoxynebularine
  modified_base 102: mod_base = OTHER; note = uniform ribonucleotides (A, C, G, inosine or U), deoxynucleotides (A, G, C, inosine or T), ribonebularine, 2'-O-methylnebularine or deoxynebularine
  modified_base 103: mod_base = OTHER; note = uniform ribonucleotides (A, C, G, inosine or U), deoxynucleotides (A, G, C, inosine or T), ribonebularine, 2'-O-methylnebularine or deoxynebularine
  modified_base 1..4: mod_base = OTHER; note = phosphorothioate linkage
  modified_base 45..46: mod_base = OTHER; note = phosphorothioate linkage
  modified_base 64..65: mod_base = OTHER; note = phosphorothioate linkage
  modified_base 97..100: mod_base = OTHER; note = phosphorothioate linkage
  misc_feature 1..100: note = RNA
  misc_feature 101..103: note = Optionally DNA or RNA

SEQ ID NO: 2847 - DNA, 103 bp, synthetic construct; identical to SEQ ID NO: 1797
  source 1..103: mol_type = other DNA
  modified_base 1: mod_base = OTHER; note = 2'-O-methyl ribonucleotide
  modified_base 2: mod_base = OTHER; note = 2'-O-methyl ribonucleotide
  modified_base 3: mod_base = OTHER; note = 2'-O-methyl ribonucleotide
  modified_base 21: mod_base = OTHER; note = 2'-O-methyl ribonucleotide
  modified_base 28: mod_base = OTHER; note = 2'-O-methyl ribonucleotide
  modified_base 29: mod_base = OTHER; note = 2'-O-methyl ribonucleotide
  modified_base 30: mod_base = OTHER; note = 2'-O-methyl ribonucleotide
  modified_base 31: mod_base = OTHER; note = 2'-O-methyl ribonucleotide
  modified_base 32: mod_base = OTHER; note = 2'-O-methyl ribonucleotide
  modified_base 33: mod_base = OTHER; note = 2'-O-methyl ribonucleotide
  modified_base 34: mod_base = OTHER; note = 2'-O-methyl ribonucleotide
  modified_base 35: mod_base = OTHER; note = 2'-O-methyl ribonucleotide
  modified_base 36: mod_base = OTHER; note = 2'-O-methyl ribonucleotide
  modified_base 37: mod_base = OTHER; note = 2'-O-methyl ribonucleotide
  modified_base 38: mod_base = OTHER; note = 2'-O-methyl ribonucleotide
  modified_base 39: mod_base = OTHER; note = 2'-O-methyl ribonucleotide
  modified_base 40: mod_base = OTHER; note = 2'-O-methyl ribonucleotide
  modified_base 41: mod_base = OTHER; note = 2'-O-methyl ribonucleotide
  modified_base 42: mod_base = OTHER; note = 2'-O-methyl ribonucleotide
  modified_base 46: mod_base = OTHER; note = 2'-O-methyl ribonucleotide
  modified_base 48: mod_base = OTHER; note = 2'-O-methyl ribonucleotide
  modified_base 50: mod_base = OTHER; note = 2'-O-methyl ribonucleotide
  modified_base 52: mod_base = OTHER; note = 2'-O-methyl ribonucleotide
  modified_base 53: mod_base = OTHER; note = 2'-O-methyl ribonucleotide
  modified_base 54: mod_base = OTHER; note = 2'-O-methyl ribonucleotide
  modified_base 57: mod_base = OTHER; note = 2'-O-methyl ribonucleotide
  modified_base 61: mod_base = OTHER; note = 2'-O-methyl ribonucleotide
  modified_base 66: mod_base = OTHER; note = 2'-O-methyl ribonucleotide
  modified_base 67: mod_base = OTHER; note = 2'-O-methyl ribonucleotide
  modified_base 70: mod_base = OTHER; note = 2'-O-methyl ribonucleotide
  modified_base 71: mod_base = OTHER; note = 2'-O-methyl ribonucleotide
  modified_base 72: mod_base = OTHER; note = 2'-O-methyl ribonucleotide
  modified_base 74: mod_base = OTHER; note = 2'-O-methyl ribonucleotide
  modified_base 75: mod_base = OTHER; note = 2'-O-methyl ribonucleotide
  modified_base 76: mod_base = OTHER; note = 2'-O-methyl ribonucleotide
  modified_base 77: mod_base = OTHER; note = 2'-O-methyl ribonucleotide
  modified_base 78: mod_base = OTHER; note = 2'-O-methyl ribonucleotide
  modified_base 79: mod_base = OTHER; note = 2'-O-methyl ribonucleotide
  modified_base 80: mod_base = OTHER; note = 2'-O-methyl ribonucleotide
  modified_base 82: mod_base = OTHER; note = 2'-O-methyl ribonucleotide
  modified_base 83: mod_base = OTHER; note = 2'-O-methyl ribonucleotide
  modified_base 84: mod_base = OTHER; note = 2'-O-methyl ribonucleotide
  modified_base 85: mod_base = OTHER; note = 2'-O-methyl ribonucleotide
  modified_base 86: mod_base = OTHER; note = 2'-O-methyl ribonucleotide
  modified_base 87: mod_base = OTHER; note = 2'-O-methyl ribonucleotide
  modified_base 89: mod_base = OTHER; note = 2'-O-methyl ribonucleotide
  modified_base 92: mod_base = OTHER; note = 2'-O-methyl ribonucleotide
  modified_base 93: mod_base = OTHER; note = 2'-O-methyl ribonucleotide
  modified_base 94: mod_base = OTHER; note = 2'-O-methyl ribonucleotide
  modified_base 95: mod_base = OTHER; note = 2'-O-methyl ribonucleotide
  modified_base 96: mod_base = OTHER; note = 2'-O-methyl ribonucleotide
  modified_base 97: mod_base = OTHER; note = 2'-O-methyl ribonucleotide
  modified_base 98: mod_base = OTHER; note = 2'-O-methyl ribonucleotide
  modified_base 99: mod_base = OTHER; note = 2'-O-methyl ribonucleotide
  modified_base 100: mod_base = OTHER; note = 2'-O-methyl ribonucleotide
  modified_base 101: mod_base = OTHER; note = uniform ribonucleotides (A, C, G, inosine or U), deoxynucleotides (A, G, C, inosine or T), ribonebularine, 2'-O-methylnebularine or deoxynebularine
  modified_base 102: mod_base = OTHER; note = uniform ribonucleotides (A, C, G, inosine or U), deoxynucleotides (A, G, C, inosine or T), ribonebularine, 2'-O-methylnebularine or deoxynebularine
  modified_base 103: mod_base = OTHER; note = uniform ribonucleotides (A, C, G, inosine or U), deoxynucleotides (A, G, C, inosine or T), ribonebularine, 2'-O-methylnebularine or deoxynebularine
  modified_base 1..4: mod_base = OTHER; note = phosphorothioate linkage
  modified_base 45..46: mod_base = OTHER; note = phosphorothioate linkage
  modified_base 64..65: mod_base = OTHER; note = phosphorothioate linkage
  modified_base 97..100: mod_base = OTHER; note = phosphorothioate linkage
  misc_feature 1..100: note = RNA
  misc_feature 101..103: note = Optionally DNA or RNA

SEQ ID NO: 2848 - DNA, 103 bp, synthetic construct; identical to SEQ ID NO: 1797
  source 1..103: mol_type = other DNA
  modified_base 1: mod_base = OTHER; note = 2'-O-methyl ribonucleotide
  modified_base 2: mod_base = OTHER; note = 2'-O-methyl ribonucleotide
  modified_base 3: mod_base = OTHER; note = 2'-O-methyl ribonucleotide
  modified_base 21: mod_base = OTHER; note = 2'-O-methyl ribonucleotide
  modified_base 28: mod_base = OTHER; note = 2'-O-methyl ribonucleotide
  modified_base 29: mod_base = OTHER; note = 2'-O-methyl ribonucleotide
  modified_base 30: mod_base = OTHER; note = 2'-O-methyl ribonucleotide
  modified_base 31: mod_base = OTHER; note = 2'-O-methyl ribonucleotide
  modified_base 32: mod_base = OTHER; note = 2'-O-methyl ribonucleotide
  modified_base 33: mod_base = OTHER; note = 2'-O-methyl ribonucleotide
  modified_base 34: mod_base = OTHER; note = 2'-O-methyl ribonucleotide
  modified_base 35: mod_base = OTHER; note = 2'-O-methyl ribonucleotide
  modified_base 36: mod_base = OTHER; note = 2'-O-methyl ribonucleotide
  modified_base 37: mod_base = OTHER; note = 2'-O-methyl ribonucleotide
  modified_base 38: mod_base = OTHER; note = 2'-O-methyl ribonucleotide
  modified_base 39: mod_base = OTHER; note = 2'-O-methyl ribonucleotide
  modified_base 40: mod_base = OTHER; note = 2'-O-methyl ribonucleotide
  modified_base 41: mod_base = OTHER; note = 2'-O-methyl ribonucleotide
  modified_base 42: mod_base = OTHER; note = 2'-O-methyl ribonucleotide
  modified_base 46: mod_base = OTHER; note = 2'-O-methyl ribonucleotide
  modified_base 48: mod_base = OTHER; note = 2'-O-methyl ribonucleotide
  modified_base 50: mod_base = OTHER; note = 2'-O-methyl ribonucleotide
  modified_base 52: mod_base = OTHER; note = 2'-O-methyl ribonucleotide
  modified_base 53: mod_base = OTHER; note = 2'-O-methyl ribonucleotide
  modified_base 54: mod_base = OTHER; note = 2'-O-methyl ribonucleotide
  modified_base 55: mod_base = OTHER; note = 2'-O-methyl ribonucleotide
  modified_base 56: mod_base = OTHER; note = 2'-O-methyl ribonucleotide
  modified_base 57: mod_base = OTHER; note = 2'-O-methyl ribonucleotide
  modified_base 60: mod_base = OTHER; note = 2'-O-methyl ribonucleotide
  modified_base 61: mod_base = OTHER; note = 2'-O-methyl ribonucleotide
  modified_base 66: mod_base = OTHER; note = 2'-O-methyl ribonucleotide
  modified_base 67: mod_base = OTHER; note = 2'-O-methyl ribonucleotide
  modified_base 70: mod_base = OTHER; note = 2'-O-methyl ribonucleotide
  modified_base 71: mod_base = OTHER; note = 2'-O-methyl ribonucleotide
  modified_base 72: mod_base = OTHER; note = 2'-O-methyl ribonucleotide
  modified_base 74: mod_base = OTHER; note = 2'-O-methyl ribonucleotide
  modified_base 75: mod_base = OTHER; note = 2'-O-methyl ribonucleotide
  modified_base 76: mod_base = OTHER; note = 2'-O-methyl ribonucleotide
  modified_base 77: mod_base = OTHER; note = 2'-O-methyl ribonucleotide
  modified_base 78: mod_base = OTHER; note = 2'-O-methyl ribonucleotide
  modified_base 79: mod_base = OTHER; note = 2'-O-methyl ribonucleotide
  modified_base 80: mod_base = OTHER; note = 2'-O-methyl ribonucleotide
  modified_base 82: mod_base = OTHER; note = 2'-O-methyl ribonucleotide
  modified_base 83: mod_base = OTHER; note = 2'-O-methyl ribonucleotide
  modified_base 84: mod_base = OTHER; note = 2'-O-methyl ribonucleotide
  modified_base 85: mod_base = OTHER; note = 2'-O-methyl ribonucleotide
  modified_base 86: mod_base = OTHER; note = 2'-O-methyl ribonucleotide
  modified_base 87: mod_base = OTHER; note = 2'-O-methyl ribonucleotide
  modified_base 89: mod_base = OTHER; note = 2'-O-methyl ribonucleotide
  modified_base 92: mod_base = OTHER; note = 2'-O-methyl ribonucleotide
  modified_base 93: mod_base = OTHER; note = 2'-O-methyl ribonucleotide
  modified_base 94: mod_base = OTHER; note = 2'-O-methyl ribonucleotide
  modified_base 95: mod_base = OTHER; note = 2'-O-methyl ribonucleotide
  modified_base 96: mod_base = OTHER; note = 2'-O-methyl ribonucleotide
  modified_base 97: mod_base = OTHER; note = 2'-O-methyl ribonucleotide
  modified_base 98: mod_base = OTHER; note = 2'-O-methyl ribonucleotide
  modified_base 99: mod_base = OTHER; note = 2'-O-methyl ribonucleotide
  modified_base 100: mod_base = OTHER; note = 2'-O-methyl ribonucleotide
  modified_base 101: mod_base = OTHER; note = uniform ribonucleotides (A, C, G, inosine or U), deoxynucleotides (A, G, C, inosine or T), ribonebularine, 2'-O-methylnebularine or deoxynebularine
  modified_base 102: mod_base = OTHER; note = uniform ribonucleotides (A, C, G, inosine or U), deoxynucleotides (A, G, C, inosine or T), ribonebularine, 2'-O-methylnebularine or deoxynebularine
  modified_base 103: mod_base = OTHER; note = uniform ribonucleotides (A, C, G, inosine or U), deoxynucleotides (A, G, C, inosine or T), ribonebularine, 2'-O-methylnebularine or deoxynebularine
  modified_base 1..4: mod_base = OTHER; note = phosphorothioate linkage
  modified_base 45..46: mod_base = OTHER; note = phosphorothioate linkage
  modified_base 64..65: mod_base = OTHER; note = phosphorothioate linkage
  modified_base 97..100: mod_base = OTHER; note = phosphorothioate linkage
  misc_feature 1..100: note = RNA
  misc_feature 101..103: note = Optionally DNA or RNA

SEQ ID NO: 2849 - DNA, 103 bp, synthetic construct; identical to SEQ ID NO: 1797
  source 1..103: mol_type = other DNA
  modified_base 1: mod_base = OTHER; note = 2'-O-methyl ribonucleotide
  modified_base 2: mod_base = OTHER; note = 2'-O-methyl ribonucleotide
  modified_base 3: mod_base = OTHER; note = 2'-O-methyl ribonucleotide
  modified_base 21: mod_base = OTHER; note = 2'-O-methyl ribonucleotide
  modified_base 28: mod_base = OTHER; note = 2'-O-methyl ribonucleotide
  modified_base 29: mod_base = OTHER; note = 2'-O-methyl ribonucleotide
  modified_base 30: mod_base = OTHER; note = 2'-O-methyl ribonucleotide
  modified_base 31: mod_base = OTHER; note = 2'-O-methyl ribonucleotide
  modified_base 32: mod_base = OTHER; note = 2'-O-methyl ribonucleotide
  modified_base 33: mod_base = OTHER; note = 2'-O-methyl ribonucleotide
  modified_base 34: mod_base = OTHER; note = 2'-O-methyl ribonucleotide
  modified_base 35: mod_base = OTHER; note = 2'-O-methyl ribonucleotide
  modified_base 36: mod_base = OTHER; note = 2'-O-methyl ribonucleotide
  modified_base 37: mod_base = OTHER; note = 2'-O-methyl ribonucleotide
  modified_base 38: mod_base = OTHER; note = 2'-O-methyl ribonucleotide
  modified_base 39: mod_base = OTHER; note = 2'-O-methyl ribonucleotide
  modified_base 40: mod_base = OTHER; note = 2'-O-methyl ribonucleotide
  modified_base 41: mod_base = OTHER; note = 2'-O-methyl ribonucleotide
  modified_base 42: mod_base = OTHER; note = 2'-O-methyl ribonucleotide
  modified_base 46: mod_base = OTHER; note = 2'-O-methyl ribonucleotide
  modified_base 48: mod_base = OTHER; note = 2'-O-methyl ribonucleotide
  modified_base 50: mod_base = OTHER; note = 2'-O-methyl ribonucleotide
  modified_base 52: mod_base = OTHER; note = 2'-O-methyl ribonucleotide
  modified_base 53: mod_base = OTHER; note = 2'-O-methyl ribonucleotide
  modified_base 54: mod_base = OTHER; note = 2'-O-methyl ribonucleotide
  modified_base 57: mod_base = OTHER; note = 2'-O-methyl ribonucleotide
  modified_base 61: mod_base = OTHER; note = 2'-O-methyl ribonucleotide
  modified_base 66: mod_base = OTHER; note = 2'-O-methyl ribonucleotide
  modified_base 67: mod_base = OTHER; note = 2'-O-methyl ribonucleotide
  modified_base 70: mod_base = OTHER; note = 2'-O-methyl ribonucleotide
  modified_base 71: mod_base = OTHER; note = 2'-O-methyl ribonucleotide
  modified_base 72: mod_base = OTHER; note = 2'-O-methyl ribonucleotide
  modified_base 73: mod_base = OTHER; note = 2'-O-methyl ribonucleotide
  modified_base 74: mod_base = OTHER; note = 2'-O-methyl ribonucleotide
  modified_base 75: mod_base = OTHER; note = 2'-O-methyl ribonucleotide
  modified_base 76: mod_base = OTHER; note = 2'-O-methyl ribonucleotide
  modified_base 77: mod_base = OTHER; note = 2'-O-methyl ribonucleotide
  modified_base 78: mod_base = OTHER; note = 2'-O-methyl ribonucleotide
  modified_base 79: mod_base = OTHER; note = 2'-O-methyl ribonucleotide
  modified_base 80: mod_base = OTHER; note = 2'-O-methyl ribonucleotide
  modified_base 82: mod_base = OTHER; note = 2'-O-methyl ribonucleotide
  modified_base 83: mod_base = OTHER; note = 2'-O-methyl ribonucleotide
  modified_base 84: mod_base = OTHER; note = 2'-O-methyl ribonucleotide
  modified_base 85: mod_base = OTHER; note = 2'-O-methyl ribonucleotide
  modified_base 86: mod_base = OTHER; note = 2'-O-methyl ribonucleotide
  modified_base 87: mod_base = OTHER; note = 2'-O-methyl ribonucleotide
  modified_base 89: mod_base = OTHER; note = 2'-O-methyl ribonucleotide
  modified_base 92: mod_base = OTHER; note = 2'-O-methyl ribonucleotide
  modified_base 93: mod_base = OTHER; note = 2'-O-methyl ribonucleotide
  modified_base 94: mod_base = OTHER; note = 2'-O-methyl ribonucleotide
  modified_base 95: mod_base = OTHER; note = 2'-O-methyl ribonucleotide
  modified_base 96: mod_base = OTHER; note = 2'-O-methyl ribonucleotide
  modified_base 97: mod_base = OTHER; note = 2'-O-methyl ribonucleotide
  modified_base 98: mod_base = OTHER; note = 2'-O-methyl ribonucleotide
  modified_base 99: mod_base = OTHER; note = 2'-O-methyl ribonucleotide
  modified_base 100: mod_base = OTHER; note = 2'-O-methyl ribonucleotide
  modified_base 101: mod_base = OTHER; note = uniform ribonucleotides (A, C, G, inosine or U), deoxynucleotides (A, G, C, inosine or T), ribonebularine, 2'-O-methylnebularine or deoxynebularine
  modified_base 102: mod_base = OTHER; note = uniform ribonucleotides (A, C, G, inosine or U), deoxynucleotides (A, G, C, inosine or T), ribonebularine, 2'-O-methylnebularine or deoxynebularine
  modified_base 103: mod_base = OTHER; note = uniform ribonucleotides (A, C, G, inosine or U), deoxynucleotides (A, G, C, inosine or T), ribonebularine, 2'-O-methylnebularine or deoxynebularine
  modified_base 1..4: mod_base = OTHER; note = phosphorothioate linkage
  modified_base 45..46: mod_base = OTHER; note = phosphorothioate linkage
  modified_base 64..65: mod_base = OTHER; note = phosphorothioate linkage
  modified_base 97..100: mod_base = OTHER; note = phosphorothioate linkage
  misc_feature 1..100: note = RNA
  misc_feature 101..103: note = Optionally DNA or RNA

SEQ ID NO: 2850 - DNA, 103 bp, synthetic construct; identical to SEQ ID NO: 1797
  source 1..103: mol_type = other DNA
  modified_base 1: mod_base = OTHER; note = 2'-O-methyl ribonucleotide
  modified_base 2: mod_base = OTHER; note = 2'-O-methyl ribonucleotide
  modified_base 3: mod_base = OTHER; note = 2'-O-methyl ribonucleotide
  modified_base 21: mod_base = OTHER; note = 2'-O-methyl ribonucleotide
  modified_base 28: mod_base = OTHER; note = 2'-O-methyl ribonucleotide
  modified_base 29: mod_base = OTHER; note = 2'-O-methyl ribonucleotide
  modified_base 30: mod_base = OTHER; note = 2'-O-methyl ribonucleotide
  modified_base 31: mod_base = OTHER; note = 2'-O-methyl ribonucleotide
  modified_base 32: mod_base = OTHER; note = 2'-O-methyl ribonucleotide
  modified_base 33: mod_base = OTHER; note = 2'-O-methyl ribonucleotide
  modified_base 34: mod_base = OTHER; note = 2'-O-methyl ribonucleotide
  modified_base 35: mod_base = OTHER; note = 2'-O-methyl ribonucleotide
  modified_base 36: mod_base = OTHER; note = 2'-O-methyl ribonucleotide
  modified_base 37: mod_base = OTHER; note = 2'-O-methyl ribonucleotide
  modified_base 38: mod_base = OTHER; note = 2'-O-methyl ribonucleotide
  modified_base 39: mod_base = OTHER; note = 2'-O-methyl ribonucleotide
  modified_base 40: mod_base = OTHER; note = 2'-O-methyl ribonucleotide
  modified_base 41: mod_base = OTHER; note = 2'-O-methyl ribonucleotide
  modified_base 42: mod_base = OTHER; note = 2'-O-methyl ribonucleotide
  modified_base 46: mod_base = OTHER; note = 2'-O-methyl ribonucleotide
  modified_base 48: mod_base = OTHER; note = 2'-O-methyl ribonucleotide
  modified_base 50: mod_base = OTHER; note = 2'-O-methyl ribonucleotide
  modified_base 52: mod_base = OTHER; note = 2'-O-methyl ribonucleotide
  modified_base 53: mod_base = OTHER; note = 2'-O-methyl ribonucleotide
  modified_base 54: mod_base = OTHER; note = 2'-O-methyl ribonucleotide
  modified_base 57: mod_base = OTHER; note = 2'-O-methyl ribonucleotide
  modified_base 61: mod_base = OTHER; note = 2'-O-methyl ribonucleotide
  modified_base 66: mod_base = OTHER; note = 2'-O-methyl ribonucleotide
  modified_base 67: mod_base = OTHER; note = 2'-O-methyl ribonucleotide
  modified_base 70: mod_base = OTHER; note = 2'-O-methyl ribonucleotide
  modified_base 71: mod_base = OTHER; note = 2'-O-methyl ribonucleotide
  modified_base 72: mod_base = OTHER; note = 2'-O-methyl ribonucleotide
  modified_base 73: mod_base = OTHER; note = 2'-O-methyl ribonucleotide
  modified_base 74: mod_base = OTHER; note = 2'-O-methyl ribonucleotide
  modified_base 75: mod_base = OTHER; note = 2'-O-methyl ribonucleotide
  modified_base 76: mod_base = OTHER; note = 2'-O-methyl ribonucleotide
  modified_base 77: mod_base = OTHER; note = 2'-O-methyl ribonucleotide
  modified_base 78: mod_base = OTHER; note = 2'-O-methyl ribonucleotide
  modified_base 79: mod_base = OTHER; note = 2'-O-methyl ribonucleotide
  modified_base 80: mod_base = OTHER; note = 2'-O-methyl ribonucleotide
  modified_base 82: mod_base = OTHER; note = 2'-O-methyl ribonucleotide
  modified_base 83: mod_base = OTHER; note = 2'-O-methyl ribonucleotide
  modified_base 84: mod_base = OTHER; note = 2'-O-methyl ribonucleotide
  modified_base 85: mod_base = OTHER; note = 2'-O-methyl ribonucleotide
  modified_base 86: mod_base = OTHER; note = 2'-O-methyl ribonucleotide
  modified_base 87: mod_base = OTHER; note = 2'-O-methyl ribonucleotide
  modified_base 89: mod_base = OTHER; note = 2'-O-methyl ribonucleotide
  modified_base 91: mod_base = OTHER; note = 2'-O-methyl ribonucleotide
  modified_base 92: mod_base = OTHER; note = 2'-O-methyl ribonucleotide
  modified_base 93: mod_base = OTHER; note = 2'-O-methyl ribonucleotide
  modified_base 94: mod_base = OTHER; note = 2'-O-methyl ribonucleotide
  modified_base 95: mod_base = OTHER; note = 2'-O-methyl ribonucleotide
  modified_base 96: mod_base = OTHER; note = 2'-O-methyl ribonucleotide
  modified_base 97: mod_base = OTHER; note = 2'-O-methyl ribonucleotide
  modified_base 98: mod_base = OTHER; note = 2'-O-methyl ribonucleotide
  modified_base 99: mod_base = OTHER; note = 2'-O-methyl ribonucleotide
  modified_base 100: mod_base = OTHER; note = 2'-O-methyl ribonucleotide
  modified_base 101: mod_base = OTHER; note = uniform ribonucleotides (A, C, G, inosine or U), deoxynucleotides (A, G, C, inosine or T), ribonebularine, 2'-O-methylnebularine or deoxynebularine
  modified_base 102: mod_base = OTHER; note = uniform ribonucleotides (A, C, G, inosine or U), deoxynucleotides (A, G, C, inosine or T), ribonebularine, 2'-O-methylnebularine or deoxynebularine
  modified_base 103: mod_base = OTHER; note = uniform ribonucleotides (A, C, G, inosine or U), deoxynucleotides (A, G, C, inosine or T), ribonebularine, 2'-O-methylnebularine or deoxynebularine
  modified_base 1..4: mod_base = OTHER; note = phosphorothioate linkage
  modified_base 45..46: mod_base = OTHER; note = phosphorothioate linkage
  modified_base 64..65: mod_base = OTHER; note = phosphorothioate linkage
  modified_base 97..100: mod_base = OTHER; note = phosphorothioate linkage
  misc_feature 1..100: note = RNA
  misc_feature 101..103: note = Optionally DNA or RNA

SEQ ID NO: 2851 - DNA, 103 bp, synthetic construct; identical to SEQ ID NO: 1797
  source 1..103: mol_type = other DNA
  modified_base 1: mod_base = OTHER; note = 2'-O-methyl ribonucleotide
  modified_base 2: mod_base = OTHER; note = 2'-O-methyl ribonucleotide
  modified_base 3: mod_base = OTHER; note = 2'-O-methyl ribonucleotide
  modified_base 21: mod_base = OTHER; note = 2'-O-methyl ribonucleotide
  modified_base 28: mod_base = OTHER; note = 2'-O-methyl ribonucleotide
  modified_base 29: mod_base = OTHER; note = 2'-O-methyl ribonucleotide
  modified_base 30: mod_base = OTHER; note = 2'-O-methyl ribonucleotide
  modified_base 31: mod_base = OTHER; note = 2'-O-methyl ribonucleotide
  modified_base 32: mod_base = OTHER; note = 2'-O-methyl ribonucleotide
  modified_base 34: mod_base = OTHER; note = 2'-O-methyl ribonucleotide
  modified_base 35: mod_base = OTHER; note = 2'-O-methyl ribonucleotide
  modified_base 36: mod_base = OTHER; note = 2'-O-methyl ribonucleotide
  modified_base 37: mod_base = OTHER; note = 2'-O-methyl ribonucleotide
  modified_base 38: mod_base = OTHER; note = 2'-O-methyl ribonucleotide
  modified_base 39: mod_base = OTHER; note = 2'-O-methyl ribonucleotide
  modified_base 40: mod_base = OTHER; note = 2'-O-methyl ribonucleotide
  modified_base 41: mod_base = OTHER; note = 2'-O-methyl ribonucleotide
  modified_base 42: mod_base = OTHER; note = 2'-O-methyl ribonucleotide
  modified_base 46: mod_base = OTHER; note = 2'-O-methyl ribonucleotide
  modified_base 48: mod_base = OTHER; note = 2'-O-methyl ribonucleotide
  modified_base 50: mod_base = OTHER; note = 2'-O-methyl ribonucleotide
  modified_base 52: mod_base = OTHER; note = 2'-O-methyl ribonucleotide
  modified_base 53: mod_base = OTHER; note = 2'-O-methyl ribonucleotide
  modified_base 54: mod_base = OTHER; note = 2'-O-methyl ribonucleotide
  modified_base 57: mod_base = OTHER; note = 2'-O-methyl ribonucleotide
  modified_base 61: mod_base = OTHER; note = 2'-O-methyl ribonucleotide
  modified_base 66: mod_base = OTHER; note = 2'-O-methyl ribonucleotide
  modified_base 67: mod_base = OTHER; note = 2'-O-methyl ribonucleotide
  modified_base 70: mod_base = OTHER; note = 2'-O-methyl ribonucleotide
  modified_base 71: mod_base = OTHER; note = 2'-O-methyl ribonucleotide
  modified_base 72: mod_base = OTHER; note = 2'-O-methyl ribonucleotide
  modified_base 73: mod_base = OTHER; note = 2'-O-methyl ribonucleotide
  modified_base 74: mod_base = OTHER; note = 2'-O-methyl ribonucleotide
  modified_base 75: mod_base = OTHER; note = 2'-O-methyl ribonucleotide
  modified_base 76: mod_base = OTHER; note = 2'-O-methyl ribonucleotide
  modified_base 77: mod_base = OTHER; note = 2'-O-methyl ribonucleotide
  modified_base 78: mod_base = OTHER; note = 2'-O-methyl ribonucleotide
  modified_base 79: mod_base = OTHER; note = 2'-O-methyl ribonucleotide
  modified_base 80: mod_base = OTHER; note = 2'-O-methyl ribonucleotide
  modified_base 82: mod_base = OTHER; note = 2'-O-methyl ribonucleotide
  modified_base 83: mod_base = OTHER; note = 2'-O-methyl ribonucleotide
  modified_base 84: mod_base = OTHER; note = 2'-O-methyl ribonucleotide
  modified_base 85: mod_base = OTHER; note = 2'-O-methyl ribonucleotide
  modified_base 86: mod_base = OTHER; note = 2'-O-methyl ribonucleotide
  modified_base 87: mod_base = OTHER; note = 2'-O-methyl ribonucleotide
  modified_base 89: mod_base = OTHER; note = 2'-O-methyl ribonucleotide
  modified_base 92: mod_base = OTHER; note = 2'-O-methyl ribonucleotide
  modified_base 93: mod_base = OTHER; note = 2'-O-methyl ribonucleotide
  modified_base 94: mod_base = OTHER; note = 2'-O-methyl ribonucleotide
  modified_base 95: mod_base = OTHER; note = 2'-O-methyl ribonucleotide
  modified_base 96: mod_base = OTHER; note = 2'-O-methyl ribonucleotide
  modified_base 97: mod_base = OTHER; note = 2'-O-methyl ribonucleotide
  modified_base 98: mod_base = OTHER; note = 2'-O-methyl ribonucleotide
  modified_base 99: mod_base = OTHER; note = 2'-O-methyl ribonucleotide
  modified_base 100: mod_base = OTHER; note = 2'-O-methyl ribonucleotide
  modified_base 101: mod_base = OTHER; note = uniform ribonucleotides (A, C, G, inosine or U), deoxynucleotides (A, G, C, inosine or T), ribonebularine, 2'-O-methylnebularine or deoxynebularine
  modified_base 102: mod_base = OTHER; note = uniform ribonucleotides (A, C, G, inosine or U), deoxynucleotides (A, G, C, inosine or T), ribonebularine, 2'-O-methylnebularine or deoxynebularine
  modified_base 103: mod_base = OTHER; note = uniform ribonucleotides (A, C, G, inosine or U), deoxynucleotides (A, G, C, inosine or T), ribonebularine, 2'-O-methylnebularine or deoxynebularine
  modified_base 1..4: mod_base = OTHER; note = phosphorothioate linkage
  modified_base 45..46: mod_base = OTHER; note = phosphorothioate linkage
  modified_base 64..65: mod_base = OTHER; note = phosphorothioate linkage
  modified_base 97..100: mod_base = OTHER; note = phosphorothioate linkage
  misc_feature 1..100: note = RNA
  misc_feature 101..103: note = Optionally DNA or RNA

SEQ ID NO: 2852 - DNA, 103 bp, synthetic construct; identical to SEQ ID NO: 1797
  source 1..103: mol_type = other DNA
  modified_base 1: mod_base = OTHER; note = 2'-O-methyl ribonucleotide
  modified_base 2: mod_base = OTHER; note = 2'-O-methyl ribonucleotide
  modified_base 3: mod_base = OTHER; note = 2'-O-methyl ribonucleotide
  modified_base 21: mod_base = OTHER; note = 2'-O-methyl ribonucleotide
  modified_base 28: mod_base = OTHER; note = 2'-O-methyl ribonucleotide
  modified_base 29: mod_base = OTHER; note = 2'-O-methyl ribonucleotide
  modified_base 30: mod_base = OTHER; note = 2'-O-methyl ribonucleotide
  modified_base 31: mod_base = OTHER; note = 2'-O-methyl ribonucleotide
  modified_base 32: mod_base = OTHER; note = 2'-O-methyl ribonucleotide
  modified_base 34: mod_base = OTHER; note = 2'-O-methyl ribonucleotide
  modified_base 35: mod_base = OTHER; note = 2'-O-methyl ribonucleotide
  modified_base 36: mod_base = OTHER; note = 2'-O-methyl ribonucleotide
  modified_base 37: mod_base = OTHER; note = 2'-O-methyl ribonucleotide
  modified_base 38: mod_base = OTHER; note = 2'-O-methyl ribonucleotide
  modified_base 39: mod_base = OTHER; note = 2'-O-methyl ribonucleotide
  modified_base 40: mod_base = OTHER; note = 2'-O-methyl ribonucleotide
  modified_base 41: mod_base = OTHER; note = 2'-O-methyl ribonucleotide
  modified_base 42: mod_base = OTHER; note = 2'-O-methyl ribonucleotide
  modified_base 46: mod_base = OTHER; note = 2'-O-methyl ribonucleotide
  modified_base 48: mod_base = OTHER; note = 2'-O-methyl ribonucleotide
  modified_base 50: mod_base = OTHER; note = 2'-O-methyl ribonucleotide
  modified_base 52: mod_base = OTHER; note = 2'-O-methyl ribonucleotide
  modified_base 53: mod_base = OTHER; note = 2'-O-methyl ribonucleotide
  modified_base 54: mod_base = OTHER; note = 2'-O-methyl ribonucleotide
  modified_base 57: mod_base = OTHER; note = 2'-O-methyl ribonucleotide
  modified_base 61: mod_base = OTHER; note = 2'-O-methyl ribonucleotide
  modified_base 66: mod_base = OTHER; note = 2'-O-methyl ribonucleotide
  modified_base 67: mod_base = OTHER; note = 2'-O-methyl ribonucleotide
  modified_base 70: mod_base = OTHER; note = 2'-O-methyl ribonucleotide
  modified_base 71: mod_base = OTHER; note = 2'-O-methyl ribonucleotide
  modified_base 72: mod_base = OTHER; note = 2'-O-methyl ribonucleotide
  modified_base 73: mod_base = OTHER; note = 2'-O-methyl ribonucleotide
  modified_base 74: mod_base = OTHER; note = 2'-O-methyl ribonucleotide
  modified_base 75: mod_base = OTHER; note = 2'-O-methyl ribonucleotide
  modified_base 76: mod_base = OTHER; note = 2'-O-methyl ribonucleotide
  modified_base 77: mod_base = OTHER; note = 2'-O-methyl ribonucleotide
  modified_base 78: mod_base = OTHER; note = 2'-O-methyl ribonucleotide
  modified_base 79: mod_base = OTHER; note = 2'-O-methyl ribonucleotide
  modified_base 80: mod_base = OTHER; note = 2'-O-methyl ribonucleotide
  modified_base 82: mod_base = OTHER; note = 2'-O-methyl ribonucleotide
  modified_base 83: mod_base = OTHER; note = 2'-O-methyl ribonucleotide
  modified_base 84: mod_base = OTHER; note = 2'-O-methyl ribonucleotide
  modified_base 85: mod_base = OTHER; note = 2'-O-methyl ribonucleotide
  modified_base 86: mod_base = OTHER; note = 2'-O-methyl ribonucleotide
  modified_base 87: mod_base = OTHER; note = 2'-O-methyl ribonucleotide
  modified_base 89: mod_base = OTHER; note = 2'-O-methyl ribonucleotide
  modified_base 91: mod_base = OTHER; note = 2'-O-methyl ribonucleotide
  modified_base 92: mod_base = OTHER; note = 2'-O-methyl ribonucleotide
  modified_base 93: mod_base = OTHER; note = 2'-O-methyl ribonucleotide
  modified_base 94: mod_base = OTHER; note = 2'-O-methyl ribonucleotide
  modified_base 95: mod_base = OTHER; note = 2'-O-methyl ribonucleotide
  modified_base 96: mod_base = OTHER; note = 2'-O-methyl ribonucleotide
  modified_base 97: mod_base = OTHER; note = 2'-O-methyl ribonucleotide
  modified_base 98: mod_base = OTHER; note = 2'-O-methyl ribonucleotide
  modified_base 99: mod_base = OTHER; note = 2'-O-methyl ribonucleotide
  modified_base 100: mod_base = OTHER; note = 2'-O-methyl ribonucleotide
  modified_base 101: mod_base = OTHER; note = uniform ribonucleotides (A, C, G, inosine or U), deoxynucleotides (A, G, C, inosine or T), ribonebularine, 2'-O-methylnebularine or deoxynebularine
  modified_base 102: mod_base = OTHER; note = uniform ribonucleotides (A, C, G, inosine or U), deoxynucleotides (A, G, C, inosine or T), ribonebularine, 2'-O-methylnebularine or deoxynebularine
  modified_base 103: mod_base = OTHER; note = uniform ribonucleotides (A, C, G, inosine or U), deoxynucleotides (A, G, C, inosine or T), ribonebularine, 2'-O-methylnebularine or deoxynebularine
  modified_base 1..4: mod_base = OTHER; note = phosphorothioate linkage
  modified_base 45..46: mod_base = OTHER; note = phosphorothioate linkage
  modified_base 64..65: mod_base = OTHER; note = phosphorothioate linkage
  modified_base 97..100: mod_base = OTHER; note = phosphorothioate linkage
  misc_feature 1..100: note = RNA
  misc_feature 101..103: note = Optionally DNA or RNA

SEQ ID NO: 2853 - DNA, 103 bp, synthetic construct; identical to SEQ ID NO: 1797
  source 1..103: mol_type = other DNA
  modified_base 1: mod_base = OTHER; note = 2'-O-methyl ribonucleotide
  modified_base 2: mod_base = OTHER; note = 2'-O-methyl ribonucleotide
  modified_base 3: mod_base = OTHER; note = 2'-O-methyl ribonucleotide
  modified_base 21: mod_base = OTHER; note = 2'-O-methyl ribonucleotide
  modified_base 28: mod_base = OTHER; note = 2'-O-methyl ribonucleotide
  modified_base 29: mod_base = OTHER; note = 2'-O-methyl ribonucleotide
  modified_base 30: mod_base = OTHER; note = 2'-O-methyl ribonucleotide
  modified_base 31: mod_base = OTHER; note = 2'-O-methyl ribonucleotide
  modified_base 32: mod_base = OTHER; note = 2'-O-methyl ribonucleotide
  modified_base 34: mod_base = OTHER; note = 2'-O-methyl ribonucleotide
  modified_base 35: mod_base = OTHER; note = 2'-O-methyl ribonucleotide
  modified_base 36: mod_base = OTHER; note = 2'-O-methyl ribonucleotide
  modified_base 37: mod_base = OTHER; note = 2'-O-methyl ribonucleotide
  modified_base 38: mod_base = OTHER; note = 2'-O-methyl ribonucleotide
  modified_base 39: mod_base = OTHER; note = 2'-O-methyl ribonucleotide
  modified_base 40: mod_base = OTHER; note = 2'-O-methyl ribonucleotide
  modified_base 41: mod_base = OTHER; note = 2'-O-methyl ribonucleotide
  modified_base 42: mod_base = OTHER; note = 2'-O-methyl ribonucleotide
  modified_base 46: mod_base = OTHER; note = 2'-O-methyl ribonucleotide
  modified_base 48: mod_base = OTHER; note = 2'-O-methyl ribonucleotide
  modified_base 50: mod_base = OTHER; note = 2'-O-methyl ribonucleotide
  modified_base 52: mod_base = OTHER; note = 2'-O-methyl ribonucleotide
  modified_base 53: mod_base = OTHER; note = 2'-O-methyl ribonucleotide
  modified_base 54: mod_base = OTHER; note = 2'-O-methyl ribonucleotide
  modified_base 55: mod_base = OTHER; note = 2'-O-methyl ribonucleotide
  modified_base 56: mod_base = OTHER; note = 2'-O-methyl ribonucleotide
  modified_base 57: mod_base = OTHER; note = 2'-O-methyl ribonucleotide
  modified_base 60: mod_base = OTHER; note = 2'-O-methyl ribonucleotide
  modified_base 61: mod_base = OTHER; note = 2'-O-methyl ribonucleotide
  modified_base 66: mod_base = OTHER; note = 2'-O-methyl ribonucleotide
  modified_base 67: mod_base = OTHER; note = 2'-O-methyl ribonucleotide
  modified_base 70: mod_base = OTHER; note = 2'-O-methyl ribonucleotide
  modified_base 71: mod_base = OTHER; note = 2'-O-methyl ribonucleotide
  modified_base 72: mod_base = OTHER; note = 2'-O-methyl ribonucleotide
  modified_base 74: mod_base = OTHER; note = 2'-O-methyl ribonucleotide
  modified_base 75: mod_base = OTHER; note = 2'-O-methyl ribonucleotide
  modified_base 76: mod_base = OTHER; note = 2'-O-methyl ribonucleotide
  modified_base 77: mod_base = OTHER; note = 2'-O-methyl ribonucleotide
  modified_base 78: mod_base = OTHER; note = 2'-O-methyl ribonucleotide
  modified_base 79: mod_base = OTHER; note = 2'-O-methyl ribonucleotide
  modified_base 80: mod_base = OTHER; note = 2'-O-methyl ribonucleotide
  modified_base 82: mod_base = OTHER; note = 2'-O-methyl ribonucleotide
  modified_base 83: mod_base = OTHER; note = 2'-O-methyl ribonucleotide
  modified_base 84: mod_base = OTHER; note = 2'-O-methyl ribonucleotide
  modified_base 85: mod_base = OTHER; note = 2'-O-methyl ribonucleotide
  modified_base 86: mod_base = OTHER; note = 2'-O-methyl ribonucleotide
  modified_base 87: mod_base = OTHER; note = 2'-O-methyl ribonucleotide
  modified_base 89: mod_base = OTHER; note = 2'-O-methyl ribonucleotide
  modified_base 92: mod_base = OTHER; note = 2'-O-methyl ribonucleotide
  modified_base 93: mod_base = OTHER; note = 2'-O-methyl ribonucleotide
  modified_base 94: mod_base = OTHER; note = 2'-O-methyl ribonucleotide
  modified_base 95: mod_base = OTHER; note = 2'-O-methyl ribonucleotide
  modified_base 96: mod_base = OTHER; note = 2'-O-methyl ribonucleotide
  modified_base 97: mod_base = OTHER; note = 2'-O-methyl ribonucleotide
  modified_base 98: mod_base = OTHER; note = 2'-O-methyl ribonucleotide
  modified_base 99: mod_base = OTHER; note = 2'-O-methyl ribonucleotide
  modified_base 100: mod_base = OTHER; note = 2'-O-methyl ribonucleotide
  modified_base 101: mod_base = OTHER; note = uniform ribonucleotides (A, C, G, inosine or U), deoxynucleotides (A, G, C, inosine or T), ribonebularine, 2'-O-methylnebularine or deoxynebularine
  modified_base 102: mod_base = OTHER; note = uniform ribonucleotides (A, C, G, inosine or U), deoxynucleotides (A, G, C, inosine or T), ribonebularine, 2'-O-methylnebularine or deoxynebularine
  modified_base 103: mod_base = OTHER; note = uniform ribonucleotides (A, C, G, inosine or U), deoxynucleotides (A, G, C, inosine or T), ribonebularine, 2'-O-methylnebularine or deoxynebularine
  modified_base 1..4: mod_base = OTHER; note = phosphorothioate linkage
  modified_base 45..46: mod_base = OTHER; note = phosphorothioate linkage
  modified_base 64..65: mod_base = OTHER; note = phosphorothioate linkage
  modified_base 97..100: mod_base = OTHER; note = phosphorothioate linkage
  misc_feature 1..100: note = RNA
  misc_feature 101..103: note = Optionally DNA or RNA

SEQ ID NO: 2854 - DNA, 103 bp, synthetic construct; identical to SEQ ID NO: 1795
  source 1..103: mol_type = other DNA
  modified_base 1: mod_base = OTHER; note = 2'-O-methyl ribonucleotide
  modified_base 2: mod_base = OTHER; note = 2'-O-methyl ribonucleotide
  modified_base 3: mod_base = OTHER; note = 2'-O-methyl ribonucleotide
  modified_base 21: mod_base = OTHER; note = 2'-O-methyl ribonucleotide
  modified_base 28: mod_base = OTHER; note = 2'-O-methyl ribonucleotide
  modified_base 29: mod_base = OTHER; note = 2'-O-methyl ribonucleotide
  modified_base 30: mod_base = OTHER; note = 2'-O-methyl ribonucleotide
  modified_base 31: mod_base = OTHER; note = 2'-O-methyl ribonucleotide
  modified_base 32: mod_base = OTHER; note = 2'-O-methyl ribonucleotide
  modified_base 33: mod_base = OTHER; note = 2'-O-methyl ribonucleotide
  modified_base 34: mod_base = OTHER; note = 2'-O-methyl ribonucleotide
  modified_base 35: mod_base = OTHER; note = 2'-O-methyl ribonucleotide
  modified_base 36: mod_base = OTHER; note = 2'-O-methyl ribonucleotide
  modified_base 37: mod_base = OTHER; note = 2'-O-methyl ribonucleotide
  modified_base 38: mod_base = OTHER; note = 2'-O-methyl ribonucleotide
  modified_base 39: mod_base = OTHER; note = 2'-O-methyl ribonucleotide
  modified_base 40: mod_base = OTHER; note = 2'-O-methyl ribonucleotide
  modified_base 41: mod_base = OTHER; note = 2'-O-methyl ribonucleotide
  modified_base 42: mod_base = OTHER; note = 2'-O-methyl ribonucleotide
  modified_base 46: mod_base = OTHER; note = 2'-O-methyl ribonucleotide
  modified_base 48: mod_base = OTHER; note = 2'-O-methyl ribonucleotide
  modified_base 50: mod_base = OTHER; note = 2'-O-methyl ribonucleotide
  modified_base 52: mod_base = OTHER; note = 2'-O-methyl ribonucleotide
  modified_base 53: mod_base = OTHER; note = 2'-O-methyl ribonucleotide
  modified_base 54: mod_base = OTHER; note = 2'-O-methyl ribonucleotide
  modified_base 55: mod_base = OTHER; note = 2'-O-methyl ribonucleotide
  modified_base 56: mod_base = OTHER; note = 2'-O-methyl ribonucleotide
  modified_base 57: mod_base = OTHER; note = 2'-O-methyl ribonucleotide
  modified_base 60: mod_base = OTHER; note = 2'-O-methyl ribonucleotide
  modified_base 61: mod_base = OTHER; note = 2'-O-methyl ribonucleotide
  modified_base 66: mod_base = OTHER; note = 2'-O-methyl ribonucleotide
  modified_base 67: mod_base = OTHER; note = 2'-O-methyl ribonucleotide
  modified_base 70: mod_base = OTHER; note = 2'-O-methyl ribonucleotide
  modified_base 71: mod_base = OTHER; note = 2'-O-methyl ribonucleotide
  modified_base 72: mod_base = OTHER; note = 2'-O-methyl ribonucleotide
  modified_base 73: mod_base = OTHER; note = 2'-O-methyl ribonucleotide
  modified_base 74: mod_base = OTHER; note = 2'-O-methyl ribonucleotide
  modified_base 75: mod_base = OTHER; note = 2'-O-methyl ribonucleotide
  modified_base 76: mod_base = OTHER; note = 2'-O-methyl ribonucleotide
  modified_base 77: mod_base = OTHER; note = 2'-O-methyl ribonucleotide
  modified_base 78: mod_base = OTHER; note = 2'-O-methyl ribonucleotide
  modified_base 79: mod_base = OTHER; note = 2'-O-methyl ribonucleotide
  modified_base 80: mod_base = OTHER; note = 2'-O-methyl ribonucleotide
  modified_base 81: mod_base = OTHER; note = 2'-O-methyl ribonucleotide
  modified_base 83: mod_base = OTHER; note = 2'-O-methyl ribonucleotide
  modified_base 84: mod_base = OTHER; note = 2'-O-methyl ribonucleotide
  modified_base 85: mod_base = OTHER; note = 2'-O-methyl ribonucleotide
  modified_base 86: mod_base = OTHER; note = 2'-O-methyl ribonucleotide
  modified_base 87: mod_base = OTHER; note = 2'-O-methyl ribonucleotide
  modified_base 88: mod_base = OTHER; note = 2'-O-methyl ribonucleotide
  modified_base 89: mod_base = OTHER; note = 2'-O-methyl ribonucleotide
  modified_base 90: mod_base = OTHER; note = 2'-O-methyl ribonucleotide
  modified_base 91: mod_base = OTHER; note = 2'-O-methyl ribonucleotide
  modified_base 92: mod_base = OTHER; note = 2'-O-methyl ribonucleotide
  modified_base 93: mod_base = OTHER; note = 2'-O-methyl ribonucleotide
  modified_base 94: mod_base = OTHER; note = 2'-O-methyl ribonucleotide
  modified_base 95: mod_base = OTHER; note = 2'-O-methyl ribonucleotide
  modified_base 96: mod_base = OTHER; note = 2'-O-methyl ribonucleotide
  modified_base 97: mod_base = OTHER; note = 2'-O-methyl ribonucleotide
  modified_base 98: mod_base = OTHER; note = 2'-O-methyl ribonucleotide
  modified_base 99: mod_base = OTHER; note = 2'-O-methyl ribonucleotide
  modified_base 100: mod_base = OTHER; note = 2'-O-methyl ribonucleotide
  modified_base 101: mod_base = OTHER; note = uniform ribonucleotides (A, C, G, inosine or U), deoxynucleotides (A, G, C, inosine or T), ribonebularine, 2'-O-methylnebularine or deoxynebularine
  modified_base 102: mod_base = OTHER; note = uniform ribonucleotides (A, C, G, inosine or U), deoxynucleotides (A, G, C, inosine or T), ribonebularine, 2'-O-methylnebularine or deoxynebularine
  modified_base 103: mod_base = OTHER; note = uniform ribonucleotides (A, C, G, inosine or U), deoxynucleotides (A, G, C, inosine or T), ribonebularine, 2'-O-methylnebularine or deoxynebularine
  modified_base 1..4: mod_base = OTHER; note = phosphorothioate linkage
  modified_base 25..26: mod_base = OTHER; note = phosphorothioate linkage
  modified_base 45..46: mod_base = OTHER; note = phosphorothioate linkage
  modified_base 97..100: mod_base = OTHER; note = phosphorothioate linkage
  misc_feature 1..100: note = RNA
  misc_feature 101..103: note = Optionally DNA or RNA

SEQ ID NO: 2855 - DNA, 103 bp, synthetic construct; identical to SEQ ID NO: 1795
  source 1..103: mol_type = other DNA
  modified_base 1: mod_base = OTHER; note = 2'-O-methyl ribonucleotide
  modified_base 2: mod_base = OTHER; note = 2'-O-methyl ribonucleotide
  modified_base 3: mod_base = OTHER; note = 2'-O-methyl ribonucleotide
  modified_base 21: mod_base = OTHER; note = 2'-O-methyl ribonucleotide
  modified_base 28: mod_base = OTHER; note = 2'-O-methyl ribonucleotide
  modified_base 29: mod_base = OTHER; note = 2'-O-methyl ribonucleotide
  modified_base 30: mod_base = OTHER; note = 2'-O-methyl ribonucleotide
  modified_base 31: mod_base = OTHER; note = 2'-O-methyl ribonucleotide
  modified_base 32: mod_base = OTHER; note = 2'-O-methyl ribonucleotide
  modified_base 34: mod_base = OTHER; note = 2'-O-methyl ribonucleotide
  modified_base 35: mod_base = OTHER; note = 2'-O-methyl ribonucleotide
  modified_base 36: mod_base = OTHER; note = 2'-O-methyl ribonucleotide
  modified_base 37: mod_base = OTHER; note = 2'-O-methyl ribonucleotide
  modified_base 38: mod_base = OTHER; note = 2'-O-methyl ribonucleotide
  modified_base 39: mod_base = OTHER; note = 2'-O-methyl ribonucleotide
  modified_base 40: mod_base = OTHER; note = 2'-O-methyl ribonucleotide
  modified_base 41: mod_base = OTHER; note = 2'-O-methyl ribonucleotide
  modified_base 42: mod_base = OTHER; note = 2'-O-methyl ribonucleotide
  modified_base 46: mod_base = OTHER; note = 2'-O-methyl ribonucleotide
  modified_base 48: mod_base = OTHER; note = 2'-O-methyl ribonucleotide
  modified_base 50: mod_base = OTHER; note = 2'-O-methyl ribonucleotide
  modified_base 52: mod_base = OTHER; note = 2'-O-methyl ribonucleotide
  modified_base 53: mod_base = OTHER; note = 2'-O-methyl ribonucleotide
  modified_base 54: mod_base = OTHER; note = 2'-O-methyl ribonucleotide
  modified_base 55: mod_base = OTHER; note = 2'-O-methyl ribonucleotide
  modified_base 56: mod_base = OTHER; note = 2'-O-methyl ribonucleotide
  modified_base 57: mod_base = OTHER; note = 2'-O-methyl ribonucleotide
  modified_base 60: mod_base = OTHER; note = 2'-O-methyl ribonucleotide
  modified_base 61: mod_base = OTHER; note = 2'-O-methyl ribonucleotide
  modified_base 66: mod_base = OTHER; note = 2'-O-methyl ribonucleotide
  modified_base 67: mod_base = OTHER; note = 2'-O-methyl ribonucleotide
  modified_base 70: mod_base = OTHER; note = 2'-O-methyl ribonucleotide
  modified_base 71: mod_base = OTHER; note = 2'-O-methyl ribonucleotide
  modified_base 72: mod_base = OTHER; note = 2'-O-methyl ribonucleotide
  modified_base 74: mod_base = OTHER; note = 2'-O-methyl ribonucleotide
  modified_base 75: mod_base = OTHER; note = 2'-O-methyl ribonucleotide
  modified_base 76: mod_base = OTHER; note = 2'-O-methyl ribonucleotide
  modified_base 77: mod_base = OTHER; note = 2'-O-methyl ribonucleotide
  modified_base 78: mod_base = OTHER; note = 2'-O-methyl ribonucleotide
  modified_base 79: mod_base = OTHER; note = 2'-O-methyl ribonucleotide
  modified_base 80: mod_base = OTHER; note = 2'-O-methyl ribonucleotide
  modified_base 81: mod_base = OTHER; note = 2'-O-methyl ribonucleotide
  modified_base 83: mod_base = OTHER; note = 2'-O-methyl ribonucleotide
  modified_base 84: mod_base = OTHER; note = 2'-O-methyl ribonucleotide
  modified_base 85: mod_base = OTHER; note = 2'-O-methyl ribonucleotide
  modified_base 86: mod_base = OTHER; note = 2'-O-methyl ribonucleotide
  modified_base 87: mod_base = OTHER; note = 2'-O-methyl ribonucleotide
  modified_base 88: mod_base = OTHER; note = 2'-O-methyl ribonucleotide
  modified_base 89: mod_base = OTHER; note = 2'-O-methyl ribonucleotide
  modified_base 90: mod_base = OTHER; note = 2'-O-methyl ribonucleotide
  modified_base 91: mod_base = OTHER; note = 2'-O-methyl ribonucleotide
  modified_base 92: mod_base = OTHER; note = 2'-O-methyl ribonucleotide
  modified_base 93: mod_base = OTHER; note = 2'-O-methyl ribonucleotide
  modified_base 94: mod_base = OTHER; note = 2'-O-methyl ribonucleotide
  modified_base 95: mod_base = OTHER; note = 2'-O-methyl ribonucleotide
  modified_base 96: mod_base = OTHER; note = 2'-O-methyl ribonucleotide
  modified_base 97: mod_base = OTHER; note = 2'-O-methyl ribonucleotide
  modified_base 98: mod_base = OTHER; note = 2'-O-methyl ribonucleotide
  modified_base 99: mod_base = OTHER; note = 2'-O-methyl ribonucleotide
  modified_base 100: mod_base = OTHER; note = 2'-O-methyl ribonucleotide
  modified_base 101: mod_base = OTHER; note = uniform ribonucleotides (A, C, G, inosine or U), deoxynucleotides (A, G, C, inosine or T), ribonebularine, 2'-O-methylnebularine or deoxynebularine
  modified_base 102: mod_base = OTHER; note = uniform ribonucleotides (A, C, G, inosine or U), deoxynucleotides (A, G, C, inosine or T), ribonebularine, 2'-O-methylnebularine or deoxynebularine
  modified_base 103: mod_base = OTHER; note = uniform ribonucleotides (A, C, G, inosine or U), deoxynucleotides (A, G, C, inosine or T), ribonebularine, 2'-O-methylnebularine or deoxynebularine
  modified_base 1..4: mod_base = OTHER; note = phosphorothioate linkage
  modified_base 25..26: mod_base = OTHER; note = phosphorothioate linkage
  modified_base 45..46: mod_base = OTHER; note = phosphorothioate linkage
  modified_base 97..100: mod_base = OTHER; note = phosphorothioate linkage
  misc_feature 1..100: note = RNA
  misc_feature 101..103: note = Optionally DNA or RNA

SEQ ID NO: 2856 - DNA, 103 bp, synthetic construct; identical to SEQ ID NO: 1796
  source 1..103: mol_type = other DNA
  modified_base 1: mod_base = OTHER; note = 2'-O-methyl ribonucleotide
  modified_base 2: mod_base = OTHER; note = 2'-O-methyl ribonucleotide
  modified_base 3: mod_base = OTHER; note = 2'-O-methyl ribonucleotide
  modified_base 21: mod_base = OTHER; note = 2'-O-methyl ribonucleotide
  modified_base 28: mod_base = OTHER; note = 2'-O-methyl ribonucleotide
  modified_base 29: mod_base = OTHER; note = 2'-O-methyl ribonucleotide
  modified_base 30: mod_base = OTHER; note = 2'-O-methyl ribonucleotide
  modified_base 31: mod_base = OTHER; note = 2'-O-methyl ribonucleotide
  modified_base 32: mod_base = OTHER; note = 2'-O-methyl ribonucleotide
  modified_base 33: mod_base = OTHER; note = 2'-O-methyl ribonucleotide
  modified_base 34: mod_base = OTHER; note = 2'-O-methyl ribonucleotide
  modified_base 35: mod_base = OTHER; note = 2'-O-methyl ribonucleotide
  modified_base 36: mod_base = OTHER; note = 2'-O-methyl ribonucleotide
  modified_base 37: mod_base = OTHER; note = 2'-O-methyl ribonucleotide
  modified_base 38: mod_base = OTHER; note = 2'-O-methyl ribonucleotide
  modified_base 39: mod_base = OTHER; note = 2'-O-methyl ribonucleotide
  modified_base 40: mod_base = OTHER; note = 2'-O-methyl ribonucleotide
  modified_base 41: mod_base = OTHER; note = 2'-O-methyl ribonucleotide
  modified_base 42: mod_base = OTHER; note = 2'-O-methyl ribonucleotide
  modified_base 46: mod_base = OTHER; note = 2'-O-methyl ribonucleotide
  modified_base 48: mod_base = OTHER; note = 2'-O-methyl ribonucleotide
  modified_base 50: mod_base = OTHER; note = 2'-O-methyl ribonucleotide
  modified_base 52: mod_base = OTHER; note = 2'-O-methyl ribonucleotide
  modified_base 53: mod_base = OTHER; note = 2'-O-methyl ribonucleotide
  modified_base 54: mod_base = OTHER; note = 2'-O-methyl ribonucleotide
  modified_base 55: mod_base = OTHER; note = 2'-O-methyl ribonucleotide
  modified_base 56: mod_base = OTHER; note = 2'-O-methyl ribonucleotide
  modified_base 57: mod_base = OTHER; note = 2'-O-methyl ribonucleotide
  modified_base 60: mod_base = OTHER; note = 2'-O-methyl ribonucleotide
  modified_base 61: mod_base = OTHER; note = 2'-O-methyl ribonucleotide
  modified_base 66: mod_base = OTHER; note = 2'-O-methyl ribonucleotide
  modified_base 67: mod_base = OTHER; note = 2'-O-methyl ribonucleotide
  modified_base 70: mod_base = OTHER; note = 2'-O-methyl ribonucleotide
  modified_base 71: mod_base = OTHER; note = 2'-O-methyl ribonucleotide
  modified_base 72: mod_base = OTHER; note = 2'-O-methyl ribonucleotide
  modified_base 73: mod_base = OTHER; note = 2'-O-methyl ribonucleotide
  modified_base 74: mod_base = OTHER; note = 2'-O-methyl ribonucleotide
  modified_base 75: mod_base = OTHER; note = 2'-O-methyl ribonucleotide
  modified_base 76: mod_base = OTHER; note = 2'-O-methyl ribonucleotide
  modified_base 77: mod_base = OTHER; note = 2'-O-methyl ribonucleotide
  modified_base 78: mod_base = OTHER; note = 2'-O-methyl ribonucleotide
  modified_base 79: mod_base = OTHER; note = 2'-O-methyl ribonucleotide
  modified_base 80: mod_base = OTHER; note = 2'-O-methyl ribonucleotide
  modified_base 81: mod_base = OTHER; note = 2'-O-methyl ribonucleotide
  modified_base 83: mod_base = OTHER; note = 2'-O-methyl ribonucleotide
  modified_base 84: mod_base = OTHER; note = 2'-O-methyl ribonucleotide
  modified_base 85: mod_base = OTHER; note = 2'-O-methyl ribonucleotide
  modified_base 86: mod_base = OTHER; note = 2'-O-methyl ribonucleotide
  modified_base 87: mod_base = OTHER; note = 2'-O-methyl ribonucleotide
  modified_base 88: mod_base = OTHER; note = 2'-O-methyl ribonucleotide
  modified_base 89: mod_base = OTHER; note = 2'-O-methyl ribonucleotide
  modified_base 90: mod_base = OTHER; note = 2'-O-methyl ribonucleotide
  modified_base 91: mod_base = OTHER; note = 2'-O-methyl ribonucleotide
  modified_base 92: mod_base = OTHER; note = 2'-O-methyl ribonucleotide
  modified_base 93: mod_base = OTHER; note = 2'-O-methyl ribonucleotide
  modified_base 94: mod_base = OTHER; note = 2'-O-methyl ribonucleotide
  modified_base 95: mod_base = OTHER; note = 2'-O-methyl ribonucleotide
  modified_base 96: mod_base = OTHER; note = 2'-O-methyl ribonucleotide
  modified_base 97: mod_base = OTHER; note = 2'-O-methyl ribonucleotide
  modified_base 98: mod_base = OTHER; note = 2'-O-methyl ribonucleotide
  modified_base 99: mod_base = OTHER; note = 2'-O-methyl ribonucleotide
  modified_base 100: mod_base = OTHER; note = 2'-O-methyl ribonucleotide
  modified_base 101: mod_base = OTHER; note = uniform ribonucleotides (A, C, G, inosine or U), deoxynucleotides (A, G, C, inosine or T), ribonebularine, 2'-O-methylnebularine or deoxynebularine
  modified_base 102: mod_base = OTHER; note = uniform ribonucleotides (A, C, G, inosine or U), deoxynucleotides (A, G, C, inosine or T), ribonebularine, 2'-O-methylnebularine or deoxynebularine
  modified_base 103: mod_base = OTHER; note = uniform ribonucleotides (A, C, G, inosine or U), deoxynucleotides (A, G, C, inosine or T), ribonebularine, 2'-O-methylnebularine or deoxynebularine
  modified_base 1..4: mod_base = OTHER; note = phosphorothioate linkage
  modified_base 25..26: mod_base = OTHER; note = phosphorothioate linkage
  modified_base 45..46: mod_base = OTHER; note = phosphorothioate linkage
  modified_base 97..100: mod_base = OTHER; note = phosphorothioate linkage
  misc_feature 1..100: note = RNA
  misc_feature 101..103: note = Optionally DNA or RNA

SEQ ID NO: 2857 - DNA, 103 bp, synthetic construct; identical to SEQ ID NO: 1796
  source 1..103: mol_type = other DNA
  modified_base 1: mod_base = OTHER; note = 2'-O-methyl ribonucleotide
  modified_base 2: mod_base = OTHER; note = 2'-O-methyl ribonucleotide
  modified_base 3: mod_base = OTHER; note = 2'-O-methyl ribonucleotide
  modified_base 21: mod_base = OTHER; note = 2'-O-methyl ribonucleotide
  modified_base 28: mod_base = OTHER; note = 2'-O-methyl ribonucleotide
  modified_base 29: mod_base = OTHER; note = 2'-O-methyl ribonucleotide
  modified_base 30: mod_base = OTHER; note = 2'-O-methyl ribonucleotide
  modified_base 31: mod_base = OTHER; note = 2'-O-methyl ribonucleotide
  modified_base 32: mod_base = OTHER; note = 2'-O-methyl ribonucleotide
  modified_base 34: mod_base = OTHER; note = 2'-O-methyl ribonucleotide
  modified_base 35: mod_base = OTHER; note = 2'-O-methyl ribonucleotide
  modified_base 36: mod_base = OTHER; note = 2'-O-methyl ribonucleotide
  modified_base 37: mod_base = OTHER; note = 2'-O-methyl ribonucleotide
  modified_base 38: mod_base = OTHER; note = 2'-O-methyl ribonucleotide
  modified_base 39: mod_base = OTHER; note = 2'-O-methyl ribonucleotide
  modified_base 40: mod_base = OTHER; note = 2'-O-methyl ribonucleotide
  modified_base 41: mod_base = OTHER; note = 2'-O-methyl ribonucleotide
  modified_base 42: mod_base = OTHER; note = 2'-O-methyl ribonucleotide
  modified_base 46: mod_base = OTHER; note = 2'-O-methyl ribonucleotide
  modified_base 48: mod_base = OTHER; note = 2'-O-methyl ribonucleotide
  modified_base 50: mod_base = OTHER; note = 2'-O-methyl ribonucleotide
  modified_base 52: mod_base = OTHER; note = 2'-O-methyl ribonucleotide
  modified_base 53: mod_base = OTHER; note = 2'-O-methyl ribonucleotide
  modified_base 54: mod_base = OTHER; note = 2'-O-methyl ribonucleotide
  modified_base 55: mod_base = OTHER; note = 2'-O-methyl ribonucleotide
  modified_base 56: mod_base = OTHER; note = 2'-O-methyl ribonucleotide
  modified_base 57: mod_base = OTHER; note = 2'-O-methyl ribonucleotide
  modified_base 60: mod_base = OTHER; note = 2'-O-methyl ribonucleotide
  modified_base 61: mod_base = OTHER; note = 2'-O-methyl ribonucleotide
  modified_base 66: mod_base = OTHER; note = 2'-O-methyl ribonucleotide
  modified_base 67: mod_base = OTHER; note = 2'-O-methyl ribonucleotide
  modified_base 70: mod_base = OTHER; note = 2'-O-methyl ribonucleotide
  modified_base 71: mod_base = OTHER; note = 2'-O-methyl ribonucleotide
  modified_base 72: mod_base = OTHER; note = 2'-O-methyl ribonucleotide
  modified_base 74: mod_base = OTHER; note = 2'-O-methyl ribonucleotide
  modified_base 75: mod_base = OTHER; note = 2'-O-methyl ribonucleotide
  modified_base 76: mod_base = OTHER; note = 2'-O-methyl ribonucleotide
  modified_base 77: mod_base = OTHER; note = 2'-O-methyl ribonucleotide
  modified_base 78: mod_base = OTHER; note = 2'-O-methyl ribonucleotide
  modified_base 79: mod_base = OTHER; note = 2'-O-methyl ribonucleotide
  modified_base 80: mod_base = OTHER; note = 2'-O-methyl ribonucleotide
  modified_base 81: mod_base = OTHER; note = 2'-O-methyl ribonucleotide
  modified_base 83: mod_base = OTHER; note = 2'-O-methyl ribonucleotide
  modified_base 84: mod_base = OTHER; note = 2'-O-methyl ribonucleotide
  modified_base 85: mod_base = OTHER; note = 2'-O-methyl ribonucleotide
  modified_base 86: mod_base = OTHER; note = 2'-O-methyl ribonucleotide
  modified_base 87: mod_base = OTHER; note = 2'-O-methyl ribonucleotide
  modified_base 88: mod_base = OTHER; note = 2'-O-methyl ribonucleotide
  modified_base 89: mod_base = OTHER; note = 2'-O-methyl ribonucleotide
  modified_base 90: mod_base = OTHER; note = 2'-O-methyl ribonucleotide
  modified_base 91: mod_base = OTHER; note = 2'-O-methyl ribonucleotide
  modified_base 92: mod_base = OTHER; note = 2'-O-methyl ribonucleotide
  modified_base 93: mod_base = OTHER; note = 2'-O-methyl ribonucleotide
  modified_base 94: mod_base = OTHER; note = 2'-O-methyl ribonucleotide
  modified_base 95: mod_base = OTHER; note = 2'-O-methyl ribonucleotide
  modified_base 96: mod_base = OTHER; note = 2'-O-methyl ribonucleotide
  modified_base 97: mod_base = OTHER; note = 2'-O-methyl ribonucleotide
  modified_base 98: mod_base = OTHER; note = 2'-O-methyl ribonucleotide
  modified_base 99: mod_base = OTHER; note = 2'-O-methyl ribonucleotide
  modified_base 100: mod_base = OTHER; note = 2'-O-methyl ribonucleotide
  modified_base 101: mod_base = OTHER; note = uniform ribonucleotides (A, C, G, inosine or U), deoxynucleotides (A, G, C, inosine or T), ribonebularine, 2'-O-methylnebularine or deoxynebularine
  modified_base 102: mod_base = OTHER; note = uniform ribonucleotides (A, C, G, inosine or U), deoxynucleotides (A, G, C, inosine or T), ribonebularine, 2'-O-methylnebularine or deoxynebularine
  modified_base 103: mod_base = OTHER; note = uniform ribonucleotides (A, C, G, inosine or U), deoxynucleotides (A, G, C, inosine or T), ribonebularine, 2'-O-methylnebularine or deoxynebularine
  modified_base 1..4: mod_base = OTHER; note = phosphorothioate linkage
  modified_base 25..26: mod_base = OTHER; note = phosphorothioate linkage
  modified_base 45..46: mod_base = OTHER; note = phosphorothioate linkage
  modified_base 97..100: mod_base = OTHER; note = phosphorothioate linkage
  misc_feature 1..100: note = RNA
  misc_feature 101..103: note = Optionally DNA or RNA

SEQ ID NO: 2858 - DNA, 103 bp, synthetic construct; identical to SEQ ID NO: 1797
  source 1..103: mol_type = other DNA
  modified_base 1: mod_base = OTHER; note = 2'-O-methyl ribonucleotide
  modified_base 2: mod_base = OTHER; note = 2'-O-methyl ribonucleotide
  modified_base 3: mod_base = OTHER; note = 2'-O-methyl ribonucleotide
  modified_base 21: mod_base = OTHER; note = 2'-O-methyl ribonucleotide
  modified_base 28: mod_base = OTHER; note = 2'-O-methyl ribonucleotide
  modified_base 29: mod_base = OTHER; note = 2'-O-methyl ribonucleotide
  modified_base 30: mod_base = OTHER; note = 2'-O-methyl ribonucleotide
  modified_base 31: mod_base = OTHER; note = 2'-O-methyl ribonucleotide
  modified_base 32: mod_base = OTHER; note = 2'-O-methyl ribonucleotide
  modified_base 33: mod_base = OTHER; note = 2'-O-methyl ribonucleotide
  modified_base 34: mod_base = OTHER; note = 2'-O-methyl ribonucleotide
  modified_base 35: mod_base = OTHER; note = 2'-O-methyl ribonucleotide
  modified_base 36: mod_base = OTHER; note = 2'-O-methyl ribonucleotide
  modified_base 37: mod_base = OTHER; note = 2'-O-methyl ribonucleotide
  modified_base 38: mod_base = OTHER; note = 2'-O-methyl ribonucleotide
  modified_base 39: mod_base = OTHER; note = 2'-O-methyl ribonucleotide
  modified_base 40: mod_base = OTHER; note = 2'-O-methyl ribonucleotide
  modified_base 41: mod_base = OTHER; note = 2'-O-methyl ribonucleotide
  modified_base 42: mod_base = OTHER; note = 2'-O-methyl ribonucleotide
  modified_base 46: mod_base = OTHER; note = 2'-O-methyl ribonucleotide
  modified_base 48: mod_base = OTHER; note = 2'-O-methyl ribonucleotide
  modified_base 50: mod_base = OTHER; note = 2'-O-methyl ribonucleotide
  modified_base 52: mod_base = OTHER; note = 2'-O-methyl ribonucleotide
  modified_base 53: mod_base = OTHER; note = 2'-O-methyl ribonucleotide
  modified_base 54: mod_base = OTHER; note = 2'-O-methyl ribonucleotide
  modified_base 57: mod_base = OTHER; note = 2'-O-methyl ribonucleotide
  modified_base 61: mod_base = OTHER; note = 2'-O-methyl ribonucleotide
  modified_base 66: mod_base = OTHER; note = 2'-O-methyl ribonucleotide
  modified_base 67: mod_base = OTHER; note = 2'-O-methyl ribonucleotide
  modified_base 70: mod_base = OTHER; note = 2'-O-methyl ribonucleotide
  modified_base 71: mod_base = OTHER; note = 2'-O-methyl ribonucleotide
  modified_base 72: mod_base = OTHER; note = 2'-O-methyl ribonucleotide
  modified_base 74: mod_base = OTHER; note = 2'-O-methyl ribonucleotide
  modified_base 75: mod_base = OTHER; note = 2'-O-methyl ribonucleotide
  modified_base 76: mod_base = OTHER; note = 2'-O-methyl ribonucleotide
  modified_base 77: mod_base = OTHER; note = 2'-O-methyl ribonucleotide
  modified_base 78: mod_base = OTHER; note = 2'-O-methyl ribonucleotide
  modified_base 79: mod_base = OTHER; note = 2'-O-methyl ribonucleotide
  modified_base 80: mod_base = OTHER; note = 2'-O-methyl ribonucleotide
  modified_base 82: mod_base = OTHER; note = 2'-O-methyl ribonucleotide
  modified_base 83: mod_base = OTHER; note = 2'-O-methyl ribonucleotide
  modified_base 84: mod_base = OTHER; note = 2'-O-methyl ribonucleotide
  modified_base 85: mod_base = OTHER; note = 2'-O-methyl ribonucleotide
  modified_base 86: mod_base = OTHER; note = 2'-O-methyl ribonucleotide
  modified_base 87: mod_base = OTHER; note = 2'-O-methyl ribonucleotide
  modified_base 89: mod_base = OTHER; note = 2'-O-methyl ribonucleotide
  modified_base 92: mod_base = OTHER; note = 2'-O-methyl ribonucleotide
  modified_base 93: mod_base = OTHER; note = 2'-O-methyl ribonucleotide
  modified_base 94: mod_base = OTHER; note = 2'-O-methyl ribonucleotide
  modified_base 95: mod_base = OTHER; note = 2'-O-methyl ribonucleotide
  modified_base 96: mod_base = OTHER; note = 2'-O-methyl ribonucleotide
  modified_base 97: mod_base = OTHER; note = 2'-O-methyl ribonucleotide
  modified_base 98: mod_base = OTHER; note = 2'-O-methyl ribonucleotide
  modified_base 99: mod_base = OTHER; note = 2'-O-methyl ribonucleotide
  modified_base 100: mod_base = OTHER; note = 2'-O-methyl ribonucleotide
  modified_base 101: mod_base = OTHER; note = uniform ribonucleotides (A, C, G, inosine or U), deoxynucleotides (A, G, C, inosine or T), ribonebularine, 2'-O-methylnebularine or deoxynebularine
  modified_base 102: mod_base = OTHER; note = uniform ribonucleotides (A, C, G, inosine or U), deoxynucleotides (A, G, C, inosine or T), ribonebularine, 2'-O-methylnebularine or deoxynebularine
  modified_base 103: mod_base = OTHER; note = uniform ribonucleotides (A, C, G, inosine or U), deoxynucleotides (A, G, C, inosine or T), ribonebularine, 2'-O-methylnebularine or deoxynebularine
  modified_base 1..4: mod_base = OTHER; note = phosphorothioate linkage
  modified_base 25..26: mod_base = OTHER; note = phosphorothioate linkage
  modified_base 45..46: mod_base = OTHER; note = phosphorothioate linkage
  modified_base 97..100: mod_base = OTHER; note = phosphorothioate linkage
  misc_feature 1..100: note = RNA
  misc_feature 101..103: note = Optionally DNA or RNA

SEQ ID NO: 2859 - DNA, 103 bp, synthetic construct; identical to SEQ ID NO: 1797
  source 1..103: mol_type = other DNA
  modified_base 1: mod_base = OTHER; note = 2'-O-methyl ribonucleotide
  modified_base 2: mod_base = OTHER; note = 2'-O-methyl ribonucleotide
  modified_base 3: mod_base = OTHER; note = 2'-O-methyl ribonucleotide
  modified_base 21: mod_base = OTHER; note = 2'-O-methyl ribonucleotide
  modified_base 28: mod_base = OTHER; note = 2'-O-methyl ribonucleotide
  modified_base 29: mod_base = OTHER; note = 2'-O-methyl ribonucleotide
  modified_base 30: mod_base = OTHER; note = 2'-O-methyl ribonucleotide
  modified_base 31: mod_base = OTHER; note = 2'-O-methyl ribonucleotide
  modified_base 32: mod_base = OTHER; note = 2'-O-methyl ribonucleotide
  modified_base 33: mod_base = OTHER; note = 2'-O-methyl ribonucleotide
  modified_base 34: mod_base = OTHER; note = 2'-O-methyl ribonucleotide
  modified_base 35: mod_base = OTHER; note = 2'-O-methyl ribonucleotide
  modified_base 36: mod_base = OTHER; note = 2'-O-methyl ribonucleotide
  modified_base 37: mod_base = OTHER; note = 2'-O-methyl ribonucleotide
  modified_base 38: mod_base = OTHER; note = 2'-O-methyl ribonucleotide
  modified_base 39: mod_base = OTHER; note = 2'-O-methyl ribonucleotide
  modified_base 40: mod_base = OTHER; note = 2'-O-methyl ribonucleotide
  modified_base 41: mod_base = OTHER; note = 2'-O-methyl ribonucleotide
  modified_base 42: mod_base = OTHER; note = 2'-O-methyl ribonucleotide
  modified_base 46: mod_base = OTHER; note = 2'-O-methyl ribonucleotide
  modified_base 48: mod_base = OTHER; note = 2'-O-methyl ribonucleotide
  modified_base 50: mod_base = OTHER; note = 2'-O-methyl ribonucleotide
  modified_base 52: mod_base = OTHER; note = 2'-O-methyl ribonucleotide
  modified_base 53: mod_base = OTHER; note = 2'-O-methyl ribonucleotide
  modified_base 54: mod_base = OTHER; note = 2'-O-methyl ribonucleotide
  modified_base 55: mod_base = OTHER; note = 2'-O-methyl ribonucleotide
  modified_base 56: mod_base = OTHER; note = 2'-O-methyl ribonucleotide
  modified_base 57: mod_base = OTHER; note = 2'-O-methyl ribonucleotide
  modified_base 60: mod_base = OTHER; note = 2'-O-methyl ribonucleotide
  modified_base 61: mod_base = OTHER; note = 2'-O-methyl ribonucleotide
  modified_base 66: mod_base = OTHER; note = 2'-O-methyl ribonucleotide
  modified_base 67: mod_base = OTHER; note = 2'-O-methyl ribonucleotide
  modified_base 70: mod_base = OTHER; note = 2'-O-methyl ribonucleotide
  modified_base 71: mod_base = OTHER; note = 2'-O-methyl ribonucleotide
  modified_base 72: mod_base = OTHER; note = 2'-O-methyl ribonucleotide
  modified_base 74: mod_base = OTHER; note = 2'-O-methyl ribonucleotide
  modified_base 75: mod_base = OTHER; note = 2'-O-methyl ribonucleotide
  modified_base 76: mod_base = OTHER; note = 2'-O-methyl ribonucleotide
  modified_base 77: mod_base = OTHER; note = 2'-O-methyl ribonucleotide
  modified_base 78: mod_base = OTHER; note = 2'-O-methyl ribonucleotide
  modified_base 79: mod_base = OTHER; note = 2'-O-methyl ribonucleotide
  modified_base 80: mod_base = OTHER; note = 2'-O-methyl ribonucleotide
  modified_base 82: mod_base = OTHER; note = 2'-O-methyl ribonucleotide
  modified_base 83: mod_base = OTHER; note = 2'-O-methyl ribonucleotide
  modified_base 84: mod_base = OTHER; note = 2'-O-methyl ribonucleotide
  modified_base 85: mod_base = OTHER; note = 2'-O-methyl ribonucleotide
  modified_base 86: mod_base = OTHER; note = 2'-O-methyl ribonucleotide
  modified_base 87: mod_base = OTHER; note = 2'-O-methyl ribonucleotide
  modified_base 89: mod_base = OTHER; note = 2'-O-methyl ribonucleotide
  modified_base 92: mod_base = OTHER; note = 2'-O-methyl ribonucleotide
  modified_base 93: mod_base = OTHER; note = 2'-O-methyl ribonucleotide
  modified_base 94: mod_base = OTHER; note = 2'-O-methyl ribonucleotide
  modified_base 95: mod_base = OTHER; note = 2'-O-methyl ribonucleotide
  modified_base 96: mod_base = OTHER; note = 2'-O-methyl ribonucleotide
  modified_base 97: mod_base = OTHER; note = 2'-O-methyl ribonucleotide
  modified_base 98: mod_base = OTHER; note = 2'-O-methyl ribonucleotide
  modified_base 99: mod_base = OTHER; note = 2'-O-methyl ribonucleotide
  modified_base 100: mod_base = OTHER; note = 2'-O-methyl ribonucleotide
  modified_base 101: mod_base = OTHER; note = uniform ribonucleotides (A, C, G, inosine or U), deoxynucleotides (A, G, C, inosine or T), ribonebularine, 2'-O-methylnebularine or deoxynebularine
  modified_base 102: mod_base = OTHER; note = uniform ribonucleotides (A, C, G, inosine or U), deoxynucleotides (A, G, C, inosine or T), ribonebularine, 2'-O-methylnebularine or deoxynebularine
  modified_base 103: mod_base = OTHER; note = uniform ribonucleotides (A, C, G, inosine or U), deoxynucleotides (A, G, C, inosine or T), ribonebularine, 2'-O-methylnebularine or deoxynebularine
  modified_base 1..4: mod_base = OTHER; note = phosphorothioate linkage
  modified_base 25..26: mod_base = OTHER; note = phosphorothioate linkage
  modified_base 45..46: mod_base = OTHER; note = phosphorothioate linkage
  modified_base 97..100: mod_base = OTHER; note = phosphorothioate linkage
  misc_feature 1..100: note = RNA
  misc_feature 101..103: note = Optionally DNA or RNA

SEQ ID NO: 2860 - DNA, 103 bp, synthetic construct; identical to SEQ ID NO: 1797
  source 1..103: mol_type = other DNA
  modified_base 1: mod_base = OTHER; note = 2'-O-methyl ribonucleotide
  modified_base 2: mod_base = OTHER; note = 2'-O-methyl ribonucleotide
  modified_base 3: mod_base = OTHER; note = 2'-O-methyl ribonucleotide
  modified_base 21: mod_base = OTHER; note = 2'-O-methyl ribonucleotide
  modified_base 28: mod_base = OTHER; note = 2'-O-methyl ribonucleotide
  modified_base 29: mod_base = OTHER; note = 2'-O-methyl ribonucleotide
  modified_base 30: mod_base = OTHER; note = 2'-O-methyl ribonucleotide
  modified_base 31: mod_base = OTHER; note = 2'-O-methyl ribonucleotide
  modified_base 32: mod_base = OTHER; note = 2'-O-methyl ribonucleotide
  modified_base 33: mod_base = OTHER; note = 2'-O-methyl ribonucleotide
  modified_base 34: mod_base = OTHER; note = 2'-O-methyl ribonucleotide
  modified_base 35: mod_base = OTHER; note = 2'-O-methyl ribonucleotide
  modified_base 36: mod_base = OTHER; note = 2'-O-methyl ribonucleotide
  modified_base 37: mod_base = OTHER; note = 2'-O-methyl ribonucleotide
  modified_base 38: mod_base = OTHER; note = 2'-O-methyl ribonucleotide
  modified_base 39: mod_base = OTHER; note = 2'-O-methyl ribonucleotide
  modified_base 40: mod_base = OTHER; note = 2'-O-methyl ribonucleotide
  modified_base 41: mod_base = OTHER; note = 2'-O-methyl ribonucleotide
  modified_base 42: mod_base = OTHER; note = 2'-O-methyl ribonucleotide
  modified_base 46: mod_base = OTHER; note = 2'-O-methyl ribonucleotide
  modified_base 48: mod_base = OTHER; note = 2'-O-methyl ribonucleotide
  modified_base 50: mod_base = OTHER; note = 2'-O-methyl ribonucleotide
  modified_base 52: mod_base = OTHER; note = 2'-O-methyl ribonucleotide
  modified_base 53: mod_base = OTHER; note = 2'-O-methyl ribonucleotide
  modified_base 54: mod_base = OTHER; note = 2'-O-methyl ribonucleotide
  modified_base 57: mod_base = OTHER; note = 2'-O-methyl ribonucleotide
  modified_base 61: mod_base = OTHER; note = 2'-O-methyl ribonucleotide
  modified_base 66: mod_base = OTHER; note = 2'-O-methyl ribonucleotide
  modified_base 67: mod_base = OTHER; note = 2'-O-methyl ribonucleotide
  modified_base 70: mod_base = OTHER; note = 2'-O-methyl ribonucleotide
  modified_base 71: mod_base = OTHER; note = 2'-O-methyl ribonucleotide
  modified_base 72: mod_base = OTHER; note = 2'-O-methyl ribonucleotide
  modified_base 73: mod_base = OTHER; note = 2'-O-methyl ribonucleotide
  modified_base 74: mod_base = OTHER; note = 2'-O-methyl ribonucleotide
  modified_base 75: mod_base = OTHER; note = 2'-O-methyl ribonucleotide
  modified_base 76: mod_base = OTHER; note = 2'-O-methyl ribonucleotide
  modified_base 77: mod_base = OTHER; note = 2'-O-methyl ribonucleotide
  modified_base 78: mod_base = OTHER; note = 2'-O-methyl ribonucleotide
  modified_base 79: mod_base = OTHER; note = 2'-O-methyl ribonucleotide
  modified_base 80: mod_base = OTHER; note = 2'-O-methyl ribonucleotide
  modified_base 82: mod_base = OTHER; note = 2'-O-methyl ribonucleotide
  modified_base 83: mod_base = OTHER; note = 2'-O-methyl ribonucleotide
  modified_base 84: mod_base = OTHER; note = 2'-O-methyl ribonucleotide
  modified_base 85: mod_base = OTHER; note = 2'-O-methyl ribonucleotide
  modified_base 86: mod_base = OTHER; note = 2'-O-methyl ribonucleotide
  modified_base 87: mod_base = OTHER; note = 2'-O-methyl ribonucleotide
  modified_base 89: mod_base = OTHER; note = 2'-O-methyl ribonucleotide
  modified_base 92: mod_base = OTHER; note = 2'-O-methyl ribonucleotide
  modified_base 93: mod_base = OTHER; note = 2'-O-methyl ribonucleotide
  modified_base 94: mod_base = OTHER; note = 2'-O-methyl ribonucleotide
  modified_base 95: mod_base = OTHER; note = 2'-O-methyl ribonucleotide
  modified_base 96: mod_base = OTHER; note = 2'-O-methyl ribonucleotide
  modified_base 97: mod_base = OTHER; note = 2'-O-methyl ribonucleotide
  modified_base 98: mod_base = OTHER; note = 2'-O-methyl ribonucleotide
  modified_base 99: mod_base = OTHER; note = 2'-O-methyl ribonucleotide
  modified_base 100: mod_base = OTHER; note = 2'-O-methyl ribonucleotide
  modified_base 101: mod_base = OTHER; note = uniform ribonucleotides (A, C, G, inosine or U), deoxynucleotides (A, G, C, inosine or T), ribonebularine, 2'-O-methylnebularine or deoxynebularine
  modified_base 102: mod_base = OTHER; note = uniform ribonucleotides (A, C, G, inosine or U), deoxynucleotides (A, G, C, inosine or T), ribonebularine, 2'-O-methylnebularine or deoxynebularine
  modified_base 103: mod_base = OTHER; note = uniform ribonucleotides (A, C, G, inosine or U), deoxynucleotides (A, G, C, inosine or T), ribonebularine, 2'-O-methylnebularine or deoxynebularine
  modified_base 1..4: mod_base = OTHER; note = phosphorothioate linkage
  modified_base 25..26: mod_base = OTHER; note = phosphorothioate linkage
  modified_base 45..46: mod_base = OTHER; note = phosphorothioate linkage
  modified_base 97..100: mod_base = OTHER; note = phosphorothioate linkage
  misc_feature 1..100: note = RNA
  misc_feature 101..103: note = Optionally DNA or RNA

SEQ ID NO: 2861 - DNA, 103 bp, synthetic construct; identical to SEQ ID NO: 1797
  source 1..103: mol_type = other DNA
  modified_base 1: mod_base = OTHER; note = 2'-O-methyl ribonucleotide
  modified_base 2: mod_base = OTHER; note = 2'-O-methyl ribonucleotide
  modified_base 3: mod_base = OTHER; note = 2'-O-methyl ribonucleotide
  modified_base 21: mod_base = OTHER; note = 2'-O-methyl ribonucleotide
  modified_base 28: mod_base = OTHER; note = 2'-O-methyl ribonucleotide
  modified_base 29: mod_base = OTHER; note = 2'-O-methyl ribonucleotide
  modified_base 30: mod_base = OTHER; note = 2'-O-methyl ribonucleotide
  modified_base 31: mod_base = OTHER; note = 2'-O-methyl ribonucleotide
  modified_base 32: mod_base = OTHER; note = 2'-O-methyl ribonucleotide
  modified_base 33: mod_base = OTHER; note = 2'-O-methyl ribonucleotide
  modified_base 34: mod_base = OTHER; note = 2'-O-methyl ribonucleotide
  modified_base 35: mod_base = OTHER; note = 2'-O-methyl ribonucleotide
  modified_base 36: mod_base = OTHER; note = 2'-O-methyl ribonucleotide
  modified_base 37: mod_base = OTHER; note = 2'-O-methyl ribonucleotide
  modified_base 38: mod_base = OTHER; note = 2'-O-methyl ribonucleotide
  modified_base 39: mod_base = OTHER; note = 2'-O-methyl ribonucleotide
  modified_base 40: mod_base = OTHER; note = 2'-O-methyl ribonucleotide
  modified_base 41: mod_base = OTHER; note = 2'-O-methyl ribonucleotide
  modified_base 42: mod_base = OTHER; note = 2'-O-methyl ribonucleotide
  modified_base 46: mod_base = OTHER; note = 2'-O-methyl ribonucleotide
  modified_base 48: mod_base = OTHER; note = 2'-O-methyl ribonucleotide
  modified_base 50: mod_base = OTHER; note = 2'-O-methyl ribonucleotide
  modified_base 52: mod_base = OTHER; note = 2'-O-methyl ribonucleotide
  modified_base 53: mod_base = OTHER; note = 2'-O-methyl ribonucleotide
  modified_base 54: mod_base = OTHER; note = 2'-O-methyl ribonucleotide
  modified_base 57: mod_base = OTHER; note = 2'-O-methyl ribonucleotide
  modified_base 61: mod_base = OTHER; note = 2'-O-methyl ribonucleotide
  modified_base 66: mod_base = OTHER; note = 2'-O-methyl ribonucleotide
  modified_base 67: mod_base = OTHER; note = 2'-O-methyl ribonucleotide
  modified_base 70: mod_base = OTHER; note = 2'-O-methyl ribonucleotide
  modified_base 71: mod_base = OTHER; note = 2'-O-methyl ribonucleotide
  modified_base 72: mod_base = OTHER; note = 2'-O-methyl ribonucleotide
  modified_base 73: mod_base = OTHER; note = 2'-O-methyl ribonucleotide
  modified_base 74: mod_base = OTHER; note = 2'-O-methyl ribonucleotide
  modified_base 75: mod_base = OTHER; note = 2'-O-methyl ribonucleotide
  modified_base 76: mod_base = OTHER; note = 2'-O-methyl ribonucleotide
  modified_base 77: mod_base = OTHER; note = 2'-O-methyl ribonucleotide
  modified_base 78: mod_base = OTHER; note = 2'-O-methyl ribonucleotide
  modified_base 79: mod_base = OTHER; note = 2'-O-methyl ribonucleotide
  modified_base 80: mod_base = OTHER; note = 2'-O-methyl ribonucleotide
  modified_base 82: mod_base = OTHER; note = 2'-O-methyl ribonucleotide
  modified_base 83: mod_base = OTHER; note = 2'-O-methyl ribonucleotide
  modified_base 84: mod_base = OTHER; note = 2'-O-methyl ribonucleotide
  modified_base 85: mod_base = OTHER; note = 2'-O-methyl ribonucleotide
  modified_base 86: mod_base = OTHER; note = 2'-O-methyl ribonucleotide
  modified_base 87: mod_base = OTHER; note = 2'-O-methyl ribonucleotide
  modified_base 89: mod_base = OTHER; note = 2'-O-methyl ribonucleotide
  modified_base 91: mod_base = OTHER; note = 2'-O-methyl ribonucleotide
  modified_base 92: mod_base = OTHER; note = 2'-O-methyl ribonucleotide
  modified_base 93: mod_base = OTHER; note = 2'-O-methyl ribonucleotide
  modified_base 94: mod_base = OTHER; note = 2'-O-methyl ribonucleotide
  modified_base 95: mod_base = OTHER; note = 2'-O-methyl ribonucleotide
  modified_base 96: mod_base = OTHER; note = 2'-O-methyl ribonucleotide
  modified_base 97: mod_base = OTHER; note = 2'-O-methyl ribonucleotide
  modified_base 98: mod_base = OTHER; note = 2'-O-methyl ribonucleotide
  modified_base 99: mod_base = OTHER; note = 2'-O-methyl ribonucleotide
  modified_base 100: mod_base = OTHER; note = 2'-O-methyl ribonucleotide
  modified_base 101: mod_base = OTHER; note = uniform ribonucleotides (A, C, G, inosine or U), deoxynucleotides (A, G, C, inosine or T), ribonebularine, 2'-O-methylnebularine or deoxynebularine
  modified_base 102: mod_base = OTHER; note = uniform ribonucleotides (A, C, G, inosine or U), deoxynucleotides (A, G, C, inosine or T), ribonebularine, 2'-O-methylnebularine or deoxynebularine
  modified_base 103: mod_base = OTHER; note = uniform ribonucleotides (A, C, G, inosine or U), deoxynucleotides (A, G, C, inosine or T), ribonebularine, 2'-O-methylnebularine or deoxynebularine
  modified_base 1..4: mod_base = OTHER; note = phosphorothioate linkage
  modified_base 25..26: mod_base = OTHER; note = phosphorothioate linkage
  modified_base 45..46: mod_base = OTHER; note = phosphorothioate linkage
  modified_base 97..100: mod_base = OTHER; note = phosphorothioate linkage
  misc_feature 1..100: note = RNA
  misc_feature 101..103: note = Optionally DNA or RNA

SEQ ID NO: 2862 - DNA, 103 bp, synthetic construct; identical to SEQ ID NO: 1797
  source 1..103: mol_type = other DNA
  modified_base 1: mod_base = OTHER; note = 2'-O-methyl ribonucleotide
  modified_base 2: mod_base = OTHER; note = 2'-O-methyl ribonucleotide
  modified_base 3: mod_base = OTHER; note = 2'-O-methyl ribonucleotide
  modified_base 21: mod_base = OTHER; note = 2'-O-methyl ribonucleotide
  modified_base 28: mod_base = OTHER; note = 2'-O-methyl ribonucleotide
  modified_base 29: mod_base = OTHER; note = 2'-O-methyl ribonucleotide
  modified_base 30: mod_base = OTHER; note = 2'-O-methyl ribonucleotide
  modified_base 31: mod_base = OTHER; note = 2'-O-methyl ribonucleotide
  modified_base 32: mod_base = OTHER; note = 2'-O-methyl ribonucleotide
  modified_base 34: mod_base = OTHER; note = 2'-O-methyl ribonucleotide
  modified_base 35: mod_base = OTHER; note = 2'-O-methyl ribonucleotide
  modified_base 36: mod_base = OTHER; note = 2'-O-methyl ribonucleotide
  modified_base 37: mod_base = OTHER; note = 2'-O-methyl ribonucleotide
  modified_base 38: mod_base = OTHER; note = 2'-O-methyl ribonucleotide
  modified_base 39: mod_base = OTHER; note = 2'-O-methyl ribonucleotide
  modified_base 40: mod_base = OTHER; note = 2'-O-methyl ribonucleotide
  modified_base 41: mod_base = OTHER; note = 2'-O-methyl ribonucleotide
  modified_base 42: mod_base = OTHER; note = 2'-O-methyl ribonucleotide
  modified_base 46: mod_base = OTHER; note = 2'-O-methyl ribonucleotide
  modified_base 48: mod_base = OTHER; note = 2'-O-methyl ribonucleotide
  modified_base 50: mod_base = OTHER; note = 2'-O-methyl ribonucleotide
  modified_base 52: mod_base = OTHER; note = 2'-O-methyl ribonucleotide
  modified_base 53: mod_base = OTHER; note = 2'-O-methyl ribonucleotide
  modified_base 54: mod_base = OTHER; note = 2'-O-methyl ribonucleotide
  modified_base 57: mod_base = OTHER; note = 2'-O-methyl ribonucleotide
  modified_base 61: mod_base = OTHER; note = 2'-O-methyl ribonucleotide
  modified_base 66: mod_base = OTHER; note = 2'-O-methyl ribonucleotide
  modified_base 67: mod_base = OTHER; note = 2'-O-methyl ribonucleotide
  modified_base 70: mod_base = OTHER; note = 2'-O-methyl ribonucleotide
  modified_base 71: mod_base = OTHER; note = 2'-O-methyl ribonucleotide
  modified_base 72: mod_base = OTHER; note = 2'-O-methyl ribonucleotide
  modified_base 73: mod_base = OTHER; note = 2'-O-methyl ribonucleotide
  modified_base 74: mod_base = OTHER; note = 2'-O-methyl ribonucleotide
  modified_base 75: mod_base = OTHER; note = 2'-O-methyl ribonucleotide
  modified_base 76: mod_base = OTHER; note = 2'-O-methyl ribonucleotide
  modified_base 77: mod_base = OTHER; note = 2'-O-methyl ribonucleotide
  modified_base 78: mod_base = OTHER; note = 2'-O-methyl ribonucleotide
  modified_base 79: mod_base = OTHER; note = 2'-O-methyl ribonucleotide
  modified_base 80: mod_base = OTHER; note = 2'-O-methyl ribonucleotide
  modified_base 82: mod_base = OTHER; note = 2'-O-methyl ribonucleotide
  modified_base 83: mod_base = OTHER; note = 2'-O-methyl ribonucleotide
  modified_base 84: mod_base = OTHER; note = 2'-O-methyl ribonucleotide
  modified_base 85: mod_base = OTHER; note = 2'-O-methyl ribonucleotide
  modified_base 86: mod_base = OTHER; note = 2'-O-methyl ribonucleotide
  modified_base 87: mod_base = OTHER; note = 2'-O-methyl ribonucleotide
  modified_base 89: mod_base = OTHER; note = 2'-O-methyl ribonucleotide
  modified_base 92: mod_base = OTHER; note = 2'-O-methyl ribonucleotide
  modified_base 93: mod_base = OTHER; note = 2'-O-methyl ribonucleotide
  modified_base 94: mod_base = OTHER; note = 2'-O-methyl ribonucleotide
  modified_base 95: mod_base = OTHER; note = 2'-O-methyl ribonucleotide
  modified_base 96: mod_base = OTHER; note = 2'-O-methyl ribonucleotide
  modified_base 97: mod_base = OTHER; note = 2'-O-methyl ribonucleotide
  modified_base 98: mod_base = OTHER; note = 2'-O-methyl ribonucleotide
  modified_base 99: mod_base = OTHER; note = 2'-O-methyl ribonucleotide
  modified_base 100: mod_base = OTHER; note = 2'-O-methyl ribonucleotide
  modified_base 101: mod_base = OTHER; note = uniform ribonucleotides (A, C, G, inosine or U), deoxynucleotides (A, G, C, inosine or T), ribonebularine, 2'-O-methylnebularine or deoxynebularine
  modified_base 102: mod_base = OTHER; note = uniform ribonucleotides (A, C, G, inosine or U), deoxynucleotides (A, G, C, inosine or T), ribonebularine, 2'-O-methylnebularine or deoxynebularine
  modified_base 103: mod_base = OTHER; note = uniform ribonucleotides (A, C, G, inosine or U), deoxynucleotides (A, G, C, inosine or T), ribonebularine, 2'-O-methylnebularine or deoxynebularine
  modified_base 1..4: mod_base = OTHER; note = phosphorothioate linkage
  modified_base 25..26: mod_base = OTHER; note = phosphorothioate linkage
  modified_base 45..46: mod_base = OTHER; note = phosphorothioate linkage
  modified_base 97..100: mod_base = OTHER; note = phosphorothioate linkage
  misc_feature 1..100: note = RNA
  misc_feature 101..103: note = Optionally DNA or RNA

SEQ ID NO: 2863 - DNA, 103 bp, synthetic construct; identical to SEQ ID NO: 1797
  source 1..103: mol_type = other DNA
  modified_base 1: mod_base = OTHER; note = 2'-O-methyl ribonucleotide
  modified_base 2: mod_base = OTHER; note = 2'-O-methyl ribonucleotide
  modified_base 3: mod_base = OTHER; note = 2'-O-methyl ribonucleotide
  modified_base 21: mod_base = OTHER; note = 2'-O-methyl ribonucleotide
  modified_base 28: mod_base = OTHER; note = 2'-O-methyl ribonucleotide
  modified_base 29: mod_base = OTHER; note = 2'-O-methyl ribonucleotide
  modified_base 30: mod_base = OTHER; note = 2'-O-methyl ribonucleotide
  modified_base 31: mod_base = OTHER; note = 2'-O-methyl ribonucleotide
  modified_base 32: mod_base = OTHER; note = 2'-O-methyl ribonucleotide
  modified_base 34: mod_base = OTHER; note = 2'-O-methyl ribonucleotide
  modified_base 35: mod_base = OTHER; note = 2'-O-methyl ribonucleotide
  modified_base 36: mod_base = OTHER; note = 2'-O-methyl ribonucleotide
  modified_base 37: mod_base = OTHER; note = 2'-O-methyl ribonucleotide
  modified_base 38: mod_base = OTHER; note = 2'-O-methyl ribonucleotide
  modified_base 39: mod_base = OTHER; note = 2'-O-methyl ribonucleotide
  modified_base 40: mod_base = OTHER; note = 2'-O-methyl ribonucleotide
  modified_base 41: mod_base = OTHER; note = 2'-O-methyl ribonucleotide
  modified_base 42: mod_base = OTHER; note = 2'-O-methyl ribonucleotide
  modified_base 46: mod_base = OTHER; note = 2'-O-methyl ribonucleotide
  modified_base 48: mod_base = OTHER; note = 2'-O-methyl ribonucleotide
  modified_base 50: mod_base = OTHER; note = 2'-O-methyl ribonucleotide
  modified_base 52: mod_base = OTHER; note = 2'-O-methyl ribonucleotide
  modified_base 53: mod_base = OTHER; note = 2'-O-methyl ribonucleotide
  modified_base 54: mod_base = OTHER; note = 2'-O-methyl ribonucleotide
  modified_base 57: mod_base = OTHER; note = 2'-O-methyl ribonucleotide
  modified_base 61: mod_base = OTHER; note = 2'-O-methyl ribonucleotide
  modified_base 66: mod_base = OTHER; note = 2'-O-methyl ribonucleotide
  modified_base 67: mod_base = OTHER; note = 2'-O-methyl ribonucleotide
  modified_base 70: mod_base = OTHER; note = 2'-O-methyl ribonucleotide
  modified_base 71: mod_base = OTHER; note = 2'-O-methyl ribonucleotide
  modified_base 72: mod_base = OTHER; note = 2'-O-methyl ribonucleotide
  modified_base 73: mod_base = OTHER; note = 2'-O-methyl ribonucleotide
  modified_base 74: mod_base = OTHER; note = 2'-O-methyl ribonucleotide
  modified_base 75: mod_base = OTHER; note = 2'-O-methyl ribonucleotide
  modified_base 76: mod_base = OTHER; note = 2'-O-methyl ribonucleotide
  modified_base 77: mod_base = OTHER; note = 2'-O-methyl ribonucleotide
  modified_base 78: mod_base = OTHER; note = 2'-O-methyl ribonucleotide
  modified_base 79: mod_base = OTHER; note = 2'-O-methyl ribonucleotide
  modified_base 80: mod_base = OTHER; note = 2'-O-methyl ribonucleotide
  modified_base 82: mod_base = OTHER; note = 2'-O-methyl ribonucleotide
  modified_base 83: mod_base = OTHER; note = 2'-O-methyl ribonucleotide
  modified_base 84: mod_base = OTHER; note = 2'-O-methyl ribonucleotide
  modified_base 85: mod_base = OTHER; note = 2'-O-methyl ribonucleotide
  modified_base 86: mod_base = OTHER; note = 2'-O-methyl ribonucleotide
  modified_base 87: mod_base = OTHER; note = 2'-O-methyl ribonucleotide
  modified_base 89: mod_base = OTHER; note = 2'-O-methyl ribonucleotide
  modified_base 91: mod_base = OTHER; note = 2'-O-methyl ribonucleotide
  modified_base 92: mod_base = OTHER; note = 2'-O-methyl ribonucleotide
  modified_base 93: mod_base = OTHER; note = 2'-O-methyl ribonucleotide
  modified_base 94: mod_base = OTHER; note = 2'-O-methyl ribonucleotide
  modified_base 95: mod_base = OTHER; note = 2'-O-methyl ribonucleotide
  modified_base 96: mod_base = OTHER; note = 2'-O-methyl ribonucleotide
  modified_base 97: mod_base = OTHER; note = 2'-O-methyl ribonucleotide
  modified_base 98: mod_base = OTHER; note = 2'-O-methyl ribonucleotide
  modified_base 99: mod_base = OTHER; note = 2'-O-methyl ribonucleotide
  modified_base 100: mod_base = OTHER; note = 2'-O-methyl ribonucleotide
  modified_base 101: mod_base = OTHER; note = uniform ribonucleotides (A, C, G, inosine or U), deoxynucleotides (A, G, C, inosine or T), ribonebularine, 2'-O-methylnebularine or deoxynebularine
  modified_base 102: mod_base = OTHER; note = uniform ribonucleotides (A, C, G, inosine or U), deoxynucleotides (A, G, C, inosine or T), ribonebularine, 2'-O-methylnebularine or deoxynebularine
  modified_base 103: mod_base = OTHER; note = uniform ribonucleotides (A, C, G, inosine or U), deoxynucleotides (A, G, C, inosine or T), ribonebularine, 2'-O-methylnebularine or deoxynebularine
  modified_base 1..4: mod_base = OTHER; note = phosphorothioate linkage
  modified_base 25..26: mod_base = OTHER; note = phosphorothioate linkage
  modified_base 45..46: mod_base = OTHER; note = phosphorothioate linkage
  modified_base 97..100: mod_base = OTHER; note = phosphorothioate linkage
  misc_feature 1..100: note = RNA
  misc_feature 101..103: note = Optionally DNA or RNA

SEQ ID NO: 2864 - DNA, 103 bp, synthetic construct; identical to SEQ ID NO: 1797
  source 1..103: mol_type = other DNA
  modified_base 1: mod_base = OTHER; note = 2'-O-methyl ribonucleotide
  modified_base 2: mod_base = OTHER; note = 2'-O-methyl ribonucleotide
  modified_base 3: mod_base = OTHER; note = 2'-O-methyl ribonucleotide
  modified_base 21: mod_base = OTHER; note = 2'-O-methyl ribonucleotide
  modified_base 28: mod_base = OTHER; note = 2'-O-methyl ribonucleotide
  modified_base 29: mod_base = OTHER; note = 2'-O-methyl ribonucleotide
  modified_base 30: mod_base = OTHER; note = 2'-O-methyl ribonucleotide
  modified_base 31: mod_base = OTHER; note = 2'-O-methyl ribonucleotide
  modified_base 32: mod_base = OTHER; note = 2'-O-methyl ribonucleotide
  modified_base 34: mod_base = OTHER; note = 2'-O-methyl ribonucleotide
  modified_base 35: mod_base = OTHER; note = 2'-O-methyl ribonucleotide
  modified_base 36: mod_base = OTHER; note = 2'-O-methyl ribonucleotide
  modified_base 37: mod_base = OTHER; note = 2'-O-methyl ribonucleotide
  modified_base 38: mod_base = OTHER; note = 2'-O-methyl ribonucleotide
  modified_base 39: mod_base = OTHER; note = 2'-O-methyl ribonucleotide
  modified_base 40: mod_base = OTHER; note = 2'-O-methyl ribonucleotide
  modified_base 41: mod_base = OTHER; note = 2'-O-methyl ribonucleotide
  modified_base 42: mod_base = OTHER; note = 2'-O-methyl ribonucleotide
  modified_base 46: mod_base = OTHER; note = 2'-O-methyl ribonucleotide
  modified_base 48: mod_base = OTHER; note = 2'-O-methyl ribonucleotide
  modified_base 50: mod_base = OTHER; note = 2'-O-methyl ribonucleotide
  modified_base 52: mod_base = OTHER; note = 2'-O-methyl ribonucleotide
  modified_base 53: mod_base = OTHER; note = 2'-O-methyl ribonucleotide
  modified_base 54: mod_base = OTHER; note = 2'-O-methyl ribonucleotide
  modified_base 55: mod_base = OTHER; note = 2'-O-methyl ribonucleotide
  modified_base 56: mod_base = OTHER; note = 2'-O-methyl ribonucleotide
  modified_base 57: mod_base = OTHER; note = 2'-O-methyl ribonucleotide
  modified_base 60: mod_base = OTHER; note = 2'-O-methyl ribonucleotide
  modified_base 61: mod_base = OTHER; note = 2'-O-methyl ribonucleotide
  modified_base 66: mod_base = OTHER; note = 2'-O-methyl ribonucleotide
  modified_base 67: mod_base = OTHER; note = 2'-O-methyl ribonucleotide
  modified_base 70: mod_base = OTHER; note = 2'-O-methyl ribonucleotide
  modified_base 71: mod_base = OTHER; note = 2'-O-methyl ribonucleotide
  modified_base 72: mod_base = OTHER; note = 2'-O-methyl ribonucleotide
  modified_base 74: mod_base = OTHER; note = 2'-O-methyl ribonucleotide
  modified_base 75: mod_base = OTHER; note = 2'-O-methyl ribonucleotide
  modified_base 76: mod_base = OTHER; note = 2'-O-methyl ribonucleotide
  modified_base 77: mod_base = OTHER; note = 2'-O-methyl ribonucleotide
  modified_base 78: mod_base = OTHER; note = 2'-O-methyl ribonucleotide
  modified_base 79: mod_base = OTHER; note = 2'-O-methyl ribonucleotide
  modified_base 80: mod_base = OTHER; note = 2'-O-methyl ribonucleotide
  modified_base 82: mod_base = OTHER; note = 2'-O-methyl ribonucleotide
  modified_base 83: mod_base = OTHER; note = 2'-O-methyl ribonucleotide
  modified_base 84: mod_base = OTHER; note = 2'-O-methyl ribonucleotide
  modified_base 85: mod_base = OTHER; note = 2'-O-methyl ribonucleotide
  modified_base 86: mod_base = OTHER; note = 2'-O-methyl ribonucleotide
  modified_base 87: mod_base = OTHER; note = 2'-O-methyl ribonucleotide
  modified_base 89: mod_base = OTHER; note = 2'-O-methyl ribonucleotide
  modified_base 92: mod_base = OTHER; note = 2'-O-methyl ribonucleotide
  modified_base 93: mod_base = OTHER; note = 2'-O-methyl ribonucleotide
  modified_base 94: mod_base = OTHER; note = 2'-O-methyl ribonucleotide
  modified_base 95: mod_base = OTHER; note = 2'-O-methyl ribonucleotide
  modified_base 96: mod_base = OTHER; note = 2'-O-methyl ribonucleotide
  modified_base 97: mod_base = OTHER; note = 2'-O-methyl ribonucleotide
  modified_base 98: mod_base = OTHER; note = 2'-O-methyl ribonucleotide
  modified_base 99: mod_base = OTHER; note = 2'-O-methyl ribonucleotide
  modified_base 100: mod_base = OTHER; note = 2'-O-methyl ribonucleotide
  modified_base 101: mod_base = OTHER; note = uniform ribonucleotides (A, C, G, inosine or U), deoxynucleotides (A, G, C, inosine or T), ribonebularine, 2'-O-methylnebularine or deoxynebularine
  modified_base 102: mod_base = OTHER; note = uniform ribonucleotides (A, C, G, inosine or U), deoxynucleotides (A, G, C, inosine or T), ribonebularine, 2'-O-methylnebularine or deoxynebularine
  modified_base 103: mod_base = OTHER; note = uniform ribonucleotides (A, C, G, inosine or U), deoxynucleotides (A, G, C, inosine or T), ribonebularine, 2'-O-methylnebularine or deoxynebularine
  modified_base 1..4: mod_base = OTHER; note = phosphorothioate linkage
  modified_base 25..26: mod_base = OTHER; note = phosphorothioate linkage
  modified_base 45..46: mod_base = OTHER; note = phosphorothioate linkage
  modified_base 97..100: mod_base = OTHER; note = phosphorothioate linkage
  misc_feature 1..100: note = RNA
  misc_feature 101..103: note = Optionally DNA or RNA

SEQ ID NO: 2865 - DNA, 103 bp, synthetic construct; identical to SEQ ID NO: 1795
  source 1..103: mol_type = other DNA
  modified_base 1: mod_base = OTHER; note = 2'-O-methyl ribonucleotide
  modified_base 2: mod_base = OTHER; note = 2'-O-methyl ribonucleotide
  modified_base 3: mod_base = OTHER; note = 2'-O-methyl ribonucleotide
  modified_base 21: mod_base = OTHER; note = 2'-O-methyl ribonucleotide
  modified_base 28: mod_base = OTHER; note = 2'-O-methyl ribonucleotide
  modified_base 29: mod_base = OTHER; note = 2'-O-methyl ribonucleotide
  modified_base 30: mod_base = OTHER; note = 2'-O-methyl ribonucleotide
  modified_base 31: mod_base = OTHER; note = 2'-O-methyl ribonucleotide
  modified_base 32: mod_base = OTHER; note = 2'-O-methyl ribonucleotide
  modified_base 33: mod_base = OTHER; note = 2'-O-methyl ribonucleotide
  modified_base 34: mod_base = OTHER; note = 2'-O-methyl ribonucleotide
  modified_base 35: mod_base = OTHER; note = 2'-O-methyl ribonucleotide
  modified_base 36: mod_base = OTHER; note = 2'-O-methyl ribonucleotide
  modified_base 37: mod_base = OTHER; note = 2'-O-methyl ribonucleotide
  modified_base 38: mod_base = OTHER; note = 2'-O-methyl ribonucleotide
  modified_base 39: mod_base = OTHER; note = 2'-O-methyl ribonucleotide
  modified_base 40: mod_base = OTHER; note = 2'-O-methyl ribonucleotide
  modified_base 41: mod_base = OTHER; note = 2'-O-methyl ribonucleotide
  modified_base 42: mod_base = OTHER; note = 2'-O-methyl ribonucleotide
  modified_base 46: mod_base = OTHER; note = 2'-O-methyl ribonucleotide
  modified_base 48: mod_base = OTHER; note = 2'-O-methyl ribonucleotide
  modified_base 50: mod_base = OTHER; note = 2'-O-methyl ribonucleotide
  modified_base 52: mod_base = OTHER; note = 2'-O-methyl ribonucleotide
  modified_base 53: mod_base = OTHER; note = 2'-O-methyl ribonucleotide
  modified_base 54: mod_base = OTHER; note = 2'-O-methyl ribonucleotide
  modified_base 55: mod_base = OTHER; note = 2'-O-methyl ribonucleotide
  modified_base 56: mod_base = OTHER; note = 2'-O-methyl ribonucleotide
  modified_base 57: mod_base = OTHER; note = 2'-O-methyl ribonucleotide
  modified_base 60: mod_base = OTHER; note = 2'-O-methyl ribonucleotide
  modified_base 61: mod_base = OTHER; note = 2'-O-methyl ribonucleotide
  modified_base 66: mod_base = OTHER; note = 2'-O-methyl ribonucleotide
  modified_base 67: mod_base = OTHER; note = 2'-O-methyl ribonucleotide
  modified_base 70: mod_base = OTHER; note = 2'-O-methyl ribonucleotide
  modified_base 71: mod_base = OTHER; note = 2'-O-methyl ribonucleotide
  modified_base 72: mod_base = OTHER; note = 2'-O-methyl ribonucleotide
  modified_base 73: mod_base = OTHER; note = 2'-O-methyl ribonucleotide
  modified_base 74: mod_base = OTHER; note = 2'-O-methyl ribonucleotide
  modified_base 75: mod_base = OTHER; note = 2'-O-methyl ribonucleotide
  modified_base 76: mod_base = OTHER; note = 2'-O-methyl ribonucleotide
  modified_base 77: mod_base = OTHER; note = 2'-O-methyl ribonucleotide
  modified_base 78: mod_base = OTHER; note = 2'-O-methyl ribonucleotide
  modified_base 79: mod_base = OTHER; note = 2'-O-methyl ribonucleotide
  modified_base 80: mod_base = OTHER; note = 2'-O-methyl ribonucleotide
  modified_base 81: mod_base = OTHER; note = 2'-O-methyl ribonucleotide
  modified_base 83: mod_base = OTHER; note = 2'-O-methyl ribonucleotide
  modified_base 84: mod_base = OTHER; note = 2'-O-methyl ribonucleotide
  modified_base 85: mod_base = OTHER; note = 2'-O-methyl ribonucleotide
  modified_base 86: mod_base = OTHER; note = 2'-O-methyl ribonucleotide
  modified_base 87: mod_base = OTHER; note = 2'-O-methyl ribonucleotide
  modified_base 88: mod_base = OTHER; note = 2'-O-methyl ribonucleotide
  modified_base 89: mod_base = OTHER; note = 2'-O-methyl ribonucleotide
  modified_base 90: mod_base = OTHER; note = 2'-O-methyl ribonucleotide
  modified_base 91: mod_base = OTHER; note = 2'-O-methyl ribonucleotide
  modified_base 92: mod_base = OTHER; note = 2'-O-methyl ribonucleotide
  modified_base 93: mod_base = OTHER; note = 2'-O-methyl ribonucleotide
  modified_base 94: mod_base = OTHER; note = 2'-O-methyl ribonucleotide
  modified_base 95: mod_base = OTHER; note = 2'-O-methyl ribonucleotide
  modified_base 96: mod_base = OTHER; note = 2'-O-methyl ribonucleotide
  modified_base 97: mod_base = OTHER; note = 2'-O-methyl ribonucleotide
  modified_base 98: mod_base = OTHER; note = 2'-O-methyl ribonucleotide
  modified_base 99: mod_base = OTHER; note = 2'-O-methyl ribonucleotide
  modified_base 100: mod_base = OTHER; note = 2'-O-methyl ribonucleotide
  modified_base 101: mod_base = OTHER; note = uniform ribonucleotides (A, C, G, inosine or U), deoxynucleotides (A, G, C, inosine or T), ribonebularine, 2'-O-methylnebularine or deoxynebularine
  modified_base 102: mod_base = OTHER; note = uniform ribonucleotides (A, C, G, inosine or U), deoxynucleotides (A, G, C, inosine or T), ribonebularine, 2'-O-methylnebularine or deoxynebularine
  modified_base 103: mod_base = OTHER; note = uniform ribonucleotides (A, C, G, inosine or U), deoxynucleotides (A, G, C, inosine or T), ribonebularine, 2'-O-methylnebularine or deoxynebularine
  modified_base 1..4: mod_base = OTHER; note = phosphorothioate linkage
  modified_base 25..26: mod_base = OTHER; note = phosphorothioate linkage
  modified_base 64..65: mod_base = OTHER; note = phosphorothioate linkage
  modified_base 97..100: mod_base = OTHER; note = phosphorothioate linkage
  misc_feature 1..100: note = RNA
  misc_feature 101..103: note = Optionally DNA or RNA

SEQ ID NO: 2866 - DNA, 103 bp, synthetic construct; identical to SEQ ID NO: 1795
  source 1..103: mol_type = other DNA
  modified_base 1: mod_base = OTHER; note = 2'-O-methyl ribonucleotide
  modified_base 2: mod_base = OTHER; note = 2'-O-methyl ribonucleotide
  modified_base 3: mod_base = OTHER; note = 2'-O-methyl ribonucleotide
  modified_base 21: mod_base = OTHER; note = 2'-O-methyl ribonucleotide
  modified_base 28: mod_base = OTHER; note = 2'-O-methyl ribonucleotide
  modified_base 29: mod_base = OTHER; note = 2'-O-methyl ribonucleotide
  modified_base 30: mod_base = OTHER; note = 2'-O-methyl ribonucleotide
  modified_base 31: mod_base = OTHER; note = 2'-O-methyl ribonucleotide
  modified_base 32: mod_base = OTHER; note = 2'-O-methyl ribonucleotide
  modified_base 34: mod_base = OTHER; note = 2'-O-methyl ribonucleotide
  modified_base 35: mod_base = OTHER; note = 2'-O-methyl ribonucleotide
  modified_base 36: mod_base = OTHER; note = 2'-O-methyl ribonucleotide
  modified_base 37: mod_base = OTHER; note = 2'-O-methyl ribonucleotide
  modified_base 38: mod_base = OTHER; note = 2'-O-methyl ribonucleotide
  modified_base 39: mod_base = OTHER; note = 2'-O-methyl ribonucleotide
  modified_base 40: mod_base = OTHER; note = 2'-O-methyl ribonucleotide
  modified_base 41: mod_base = OTHER; note = 2'-O-methyl ribonucleotide
  modified_base 42: mod_base = OTHER; note = 2'-O-methyl ribonucleotide
  modified_base 46: mod_base = OTHER; note = 2'-O-methyl ribonucleotide
  modified_base 48: mod_base = OTHER; note = 2'-O-methyl ribonucleotide
  modified_base 50: mod_base = OTHER; note = 2'-O-methyl ribonucleotide
  modified_base 52: mod_base = OTHER; note = 2'-O-methyl ribonucleotide
  modified_base 53: mod_base = OTHER; note = 2'-O-methyl ribonucleotide
  modified_base 54: mod_base = OTHER; note = 2'-O-methyl ribonucleotide
  modified_base 55: mod_base = OTHER; note = 2'-O-methyl ribonucleotide
  modified_base 56: mod_base = OTHER; note = 2'-O-methyl ribonucleotide
  modified_base 57: mod_base = OTHER; note = 2'-O-methyl ribonucleotide
  modified_base 60: mod_base = OTHER; note = 2'-O-methyl ribonucleotide
  modified_base 61: mod_base = OTHER; note = 2'-O-methyl ribonucleotide
  modified_base 66: mod_base = OTHER; note = 2'-O-methyl ribonucleotide
  modified_base 67: mod_base = OTHER; note = 2'-O-methyl ribonucleotide
  modified_base 70: mod_base = OTHER; note = 2'-O-methyl ribonucleotide
  modified_base 71: mod_base = OTHER; note = 2'-O-methyl ribonucleotide
  modified_base 72: mod_base = OTHER; note = 2'-O-methyl ribonucleotide
  modified_base 74: mod_base = OTHER; note = 2'-O-methyl ribonucleotide
  modified_base 75: mod_base = OTHER; note = 2'-O-methyl ribonucleotide
  modified_base 76: mod_base = OTHER; note = 2'-O-methyl ribonucleotide
  modified_base 77: mod_base = OTHER; note = 2'-O-methyl ribonucleotide
  modified_base 78: mod_base = OTHER; note = 2'-O-methyl ribonucleotide
  modified_base 79: mod_base = OTHER; note = 2'-O-methyl ribonucleotide
  modified_base 80: mod_base = OTHER; note = 2'-O-methyl ribonucleotide
  modified_base 81: mod_base = OTHER; note = 2'-O-methyl ribonucleotide
  modified_base 83: mod_base = OTHER; note = 2'-O-methyl ribonucleotide
  modified_base 84: mod_base = OTHER; note = 2'-O-methyl ribonucleotide
  modified_base 85: mod_base = OTHER; note = 2'-O-methyl ribonucleotide
  modified_base 86: mod_base = OTHER; note = 2'-O-methyl ribonucleotide
  modified_base 87: mod_base = OTHER; note = 2'-O-methyl ribonucleotide
  modified_base 88: mod_base = OTHER; note = 2'-O-methyl ribonucleotide
  modified_base 89: mod_base = OTHER; note = 2'-O-methyl ribonucleotide
  modified_base 90: mod_base = OTHER; note = 2'-O-methyl ribonucleotide
  modified_base 91: mod_base = OTHER; note = 2'-O-methyl ribonucleotide
  modified_base 92: mod_base = OTHER; note = 2'-O-methyl ribonucleotide
  modified_base 93: mod_base = OTHER; note = 2'-O-methyl ribonucleotide
  modified_base 94: mod_base = OTHER; note = 2'-O-methyl ribonucleotide
  modified_base 95: mod_base = OTHER; note = 2'-O-methyl ribonucleotide
  modified_base 96: mod_base = OTHER; note = 2'-O-methyl ribonucleotide
  modified_base 97: mod_base = OTHER; note = 2'-O-methyl ribonucleotide
  modified_base 98: mod_base = OTHER; note = 2'-O-methyl ribonucleotide
  modified_base 99: mod_base = OTHER; note = 2'-O-methyl ribonucleotide
  modified_base 100: mod_base = OTHER; note = 2'-O-methyl ribonucleotide
  modified_base 101: mod_base = OTHER; note = uniform ribonucleotides (A, C, G, inosine or U), deoxynucleotides (A, G, C, inosine or T), ribonebularine, 2'-O-methylnebularine or deoxynebularine
  modified_base 102: mod_base = OTHER; note = uniform ribonucleotides (A, C, G, inosine or U), deoxynucleotides (A, G, C, inosine or T), ribonebularine, 2'-O-methylnebularine or deoxynebularine
  modified_base 103: mod_base = OTHER; note = uniform ribonucleotides (A, C, G, inosine or U), deoxynucleotides (A, G, C, inosine or T), ribonebularine, 2'-O-methylnebularine or deoxynebularine
  modified_base 1..4: mod_base = OTHER; note = phosphorothioate linkage
  modified_base 25..26: mod_base = OTHER; note = phosphorothioate linkage
  modified_base 64..65: mod_base = OTHER; note = phosphorothioate linkage
  modified_base 97..100: mod_base = OTHER; note = phosphorothioate linkage
  misc_feature 1..100: note = RNA
  misc_feature 101..103: note = Optionally DNA or RNA

SEQ ID NO: 2867 - DNA, 103 bp, synthetic construct; identical to SEQ ID NO: 1796
  source 1..103: mol_type = other DNA
  modified_base 1: mod_base = OTHER; note = 2'-O-methyl ribonucleotide
  modified_base 2: mod_base = OTHER; note = 2'-O-methyl ribonucleotide
  modified_base 3: mod_base = OTHER; note = 2'-O-methyl ribonucleotide
  modified_base 21: mod_base = OTHER; note = 2'-O-methyl ribonucleotide
  modified_base 28: mod_base = OTHER; note = 2'-O-methyl ribonucleotide
  modified_base 29: mod_base = OTHER; note = 2'-O-methyl ribonucleotide
  modified_base 30: mod_base = OTHER; note = 2'-O-methyl ribonucleotide
  modified_base 31: mod_base = OTHER; note = 2'-O-methyl ribonucleotide
  modified_base 32: mod_base = OTHER; note = 2'-O-methyl ribonucleotide
  modified_base 33: mod_base = OTHER; note = 2'-O-methyl ribonucleotide
  modified_base 34: mod_base = OTHER; note = 2'-O-methyl ribonucleotide
  modified_base 35: mod_base = OTHER; note = 2'-O-methyl ribonucleotide
  modified_base 36: mod_base = OTHER; note = 2'-O-methyl ribonucleotide
  modified_base 37: mod_base = OTHER; note = 2'-O-methyl ribonucleotide
  modified_base 38: mod_base = OTHER; note = 2'-O-methyl ribonucleotide
  modified_base 39: mod_base = OTHER; note = 2'-O-methyl ribonucleotide
  modified_base 40: mod_base = OTHER; note = 2'-O-methyl ribonucleotide
  modified_base 41: mod_base = OTHER; note = 2'-O-methyl ribonucleotide
  modified_base 42: mod_base = OTHER; note = 2'-O-methyl ribonucleotide
  modified_base 46: mod_base = OTHER; note = 2'-O-methyl ribonucleotide
  modified_base 48: mod_base = OTHER; note = 2'-O-methyl ribonucleotide
  modified_base 50: mod_base = OTHER; note = 2'-O-methyl ribonucleotide
  modified_base 52: mod_base = OTHER; note = 2'-O-methyl ribonucleotide
  modified_base 53: mod_base = OTHER; note = 2'-O-methyl ribonucleotide
  modified_base 54: mod_base = OTHER; note = 2'-O-methyl ribonucleotide
  modified_base 55: mod_base = OTHER; note = 2'-O-methyl ribonucleotide
  modified_base 56: mod_base = OTHER; note = 2'-O-methyl ribonucleotide
  modified_base 57: mod_base = OTHER; note = 2'-O-methyl ribonucleotide
  modified_base 60: mod_base = OTHER; note = 2'-O-methyl ribonucleotide
  modified_base 61: mod_base = OTHER; note = 2'-O-methyl ribonucleotide
  modified_base 66: mod_base = OTHER; note = 2'-O-methyl ribonucleotide
  modified_base 67: mod_base = OTHER; note = 2'-O-methyl ribonucleotide
  modified_base 70: mod_base = OTHER; note = 2'-O-methyl ribonucleotide
  modified_base 71: mod_base = OTHER; note = 2'-O-methyl ribonucleotide
  modified_base 72: mod_base = OTHER; note = 2'-O-methyl ribonucleotide
  modified_base 73: mod_base = OTHER; note = 2'-O-methyl ribonucleotide
  modified_base 74: mod_base = OTHER; note = 2'-O-methyl ribonucleotide
  modified_base 75: mod_base = OTHER; note = 2'-O-methyl ribonucleotide
  modified_base 76: mod_base = OTHER; note = 2'-O-methyl ribonucleotide
  modified_base 77: mod_base = OTHER; note = 2'-O-methyl ribonucleotide
  modified_base 78: mod_base = OTHER; note = 2'-O-methyl ribonucleotide
  modified_base 79: mod_base = OTHER; note = 2'-O-methyl ribonucleotide
  modified_base 80: mod_base = OTHER; note = 2'-O-methyl ribonucleotide
  modified_base 81: mod_base = OTHER; note = 2'-O-methyl ribonucleotide
  modified_base 83: mod_base = OTHER; note = 2'-O-methyl ribonucleotide
  modified_base 84: mod_base = OTHER; note = 2'-O-methyl ribonucleotide
  modified_base 85: mod_base = OTHER; note = 2'-O-methyl ribonucleotide
  modified_base 86: mod_base = OTHER; note = 2'-O-methyl ribonucleotide
  modified_base 87: mod_base = OTHER; note = 2'-O-methyl ribonucleotide
  modified_base 88: mod_base = OTHER; note = 2'-O-methyl ribonucleotide
  modified_base 89: mod_base = OTHER; note = 2'-O-methyl ribonucleotide
  modified_base 90: mod_base = OTHER; note = 2'-O-methyl ribonucleotide
  modified_base 91: mod_base = OTHER; note = 2'-O-methyl ribonucleotide
  modified_base 92: mod_base = OTHER; note = 2'-O-methyl ribonucleotide
  modified_base 93: mod_base = OTHER; note = 2'-O-methyl ribonucleotide
  modified_base 94: mod_base = OTHER; note = 2'-O-methyl ribonucleotide
  modified_base 95: mod_base = OTHER; note = 2'-O-methyl ribonucleotide
  modified_base 96: mod_base = OTHER; note = 2'-O-methyl ribonucleotide
  modified_base 97: mod_base = OTHER; note = 2'-O-methyl ribonucleotide
  modified_base 98: mod_base = OTHER; note = 2'-O-methyl ribonucleotide
  modified_base 99: mod_base = OTHER; note = 2'-O-methyl ribonucleotide
  modified_base 100: mod_base = OTHER; note = 2'-O-methyl ribonucleotide
  modified_base 101: mod_base = OTHER; note = uniform ribonucleotides (A, C, G, inosine or U), deoxynucleotides (A, G, C, inosine or T), ribonebularine, 2'-O-methylnebularine or deoxynebularine
  modified_base 102: mod_base = OTHER; note = uniform ribonucleotides (A, C, G, inosine or U), deoxynucleotides (A, G, C, inosine or T), ribonebularine, 2'-O-methylnebularine or deoxynebularine
  modified_base 103: mod_base = OTHER; note = uniform ribonucleotides (A, C, G, inosine or U), deoxynucleotides (A, G, C, inosine or T), ribonebularine, 2'-O-methylnebularine or deoxynebularine
  modified_base 1..4: mod_base = OTHER; note = phosphorothioate linkage
  modified_base 25..26: mod_base = OTHER; note = phosphorothioate linkage
  modified_base 64..65: mod_base = OTHER; note = phosphorothioate linkage
  modified_base 97..100: mod_base = OTHER; note = phosphorothioate linkage
  misc_feature 1..100: note = RNA
  misc_feature 101..103: note = Optionally DNA or RNA

SEQ ID NO: 2868 - DNA, 103 bp, synthetic construct; identical to SEQ ID NO: 1796
  source 1..103: mol_type = other DNA
  modified_base 1: mod_base = OTHER; note = 2'-O-methyl ribonucleotide
  modified_base 2: mod_base = OTHER; note = 2'-O-methyl ribonucleotide
  modified_base 3: mod_base = OTHER; note = 2'-O-methyl ribonucleotide
  modified_base 21: mod_base = OTHER; note = 2'-O-methyl ribonucleotide
  modified_base 28: mod_base = OTHER; note = 2'-O-methyl ribonucleotide
  modified_base 29: mod_base = OTHER; note = 2'-O-methyl ribonucleotide
  modified_base 30: mod_base = OTHER; note = 2'-O-methyl ribonucleotide
  modified_base 31: mod_base = OTHER; note = 2'-O-methyl ribonucleotide
  modified_base 32: mod_base = OTHER; note = 2'-O-methyl ribonucleotide
  modified_base 34: mod_base = OTHER; note = 2'-O-methyl ribonucleotide
  modified_base 35: mod_base = OTHER; note = 2'-O-methyl ribonucleotide
  modified_base 36: mod_base = OTHER; note = 2'-O-methyl ribonucleotide
  modified_base 37: mod_base = OTHER; note = 2'-O-methyl ribonucleotide
  modified_base 38: mod_base = OTHER; note = 2'-O-methyl ribonucleotide
  modified_base 39: mod_base = OTHER; note = 2'-O-methyl ribonucleotide
  modified_base 40: mod_base = OTHER; note = 2'-O-methyl ribonucleotide
  modified_base 41: mod_base = OTHER; note = 2'-O-methyl ribonucleotide
  modified_base 42: mod_base = OTHER; note = 2'-O-methyl ribonucleotide
  modified_base 46: mod_base = OTHER; note = 2'-O-methyl ribonucleotide
  modified_base 48: mod_base = OTHER; note = 2'-O-methyl ribonucleotide
  modified_base 50: mod_base = OTHER; note = 2'-O-methyl ribonucleotide
  modified_base 52: mod_base = OTHER; note = 2'-O-methyl ribonucleotide
  modified_base 53: mod_base = OTHER; note = 2'-O-methyl ribonucleotide
  modified_base 54: mod_base = OTHER; note = 2'-O-methyl ribonucleotide
  modified_base 55: mod_base = OTHER; note = 2'-O-methyl ribonucleotide
  modified_base 56: mod_base = OTHER; note = 2'-O-methyl ribonucleotide
  modified_base 57: mod_base = OTHER; note = 2'-O-methyl ribonucleotide
  modified_base 60: mod_base = OTHER; note = 2'-O-methyl ribonucleotide
  modified_base 61: mod_base = OTHER; note = 2'-O-methyl ribonucleotide
  modified_base 66: mod_base = OTHER; note = 2'-O-methyl ribonucleotide
  modified_base 67: mod_base = OTHER; note = 2'-O-methyl ribonucleotide
  modified_base 70: mod_base = OTHER; note = 2'-O-methyl ribonucleotide
  modified_base 71: mod_base = OTHER; note = 2'-O-methyl ribonucleotide
  modified_base 72: mod_base = OTHER; note = 2'-O-methyl ribonucleotide
  modified_base 74: mod_base = OTHER; note = 2'-O-methyl ribonucleotide
  modified_base 75: mod_base = OTHER; note = 2'-O-methyl ribonucleotide
  modified_base 76: mod_base = OTHER; note = 2'-O-methyl ribonucleotide
  modified_base 77: mod_base = OTHER; note = 2'-O-methyl ribonucleotide
  modified_base 78: mod_base = OTHER; note = 2'-O-methyl ribonucleotide
  modified_base 79: mod_base = OTHER; note = 2'-O-methyl ribonucleotide
  modified_base 80: mod_base = OTHER; note = 2'-O-methyl ribonucleotide
  modified_base 81: mod_base = OTHER; note = 2'-O-methyl ribonucleotide
  modified_base 83: mod_base = OTHER; note = 2'-O-methyl ribonucleotide
  modified_base 84: mod_base = OTHER; note = 2'-O-methyl ribonucleotide
  modified_base 85: mod_base = OTHER; note = 2'-O-methyl ribonucleotide
  modified_base 86: mod_base = OTHER; note = 2'-O-methyl ribonucleotide
  modified_base 87: mod_base = OTHER; note = 2'-O-methyl ribonucleotide
  modified_base 88: mod_base = OTHER; note = 2'-O-methyl ribonucleotide
  modified_base 89: mod_base = OTHER; note = 2'-O-methyl ribonucleotide
  modified_base 90: mod_base = OTHER; note = 2'-O-methyl ribonucleotide
  modified_base 91: mod_base = OTHER; note = 2'-O-methyl ribonucleotide
  modified_base 92: mod_base = OTHER; note = 2'-O-methyl ribonucleotide
  modified_base 93: mod_base = OTHER; note = 2'-O-methyl ribonucleotide
  modified_base 94: mod_base = OTHER; note = 2'-O-methyl ribonucleotide
  modified_base 95: mod_base = OTHER; note = 2'-O-methyl ribonucleotide
  modified_base 96: mod_base = OTHER; note = 2'-O-methyl ribonucleotide
  modified_base 97: mod_base = OTHER; note = 2'-O-methyl ribonucleotide
  modified_base 98: mod_base = OTHER; note = 2'-O-methyl ribonucleotide
  modified_base 99: mod_base = OTHER; note = 2'-O-methyl ribonucleotide
  modified_base 100: mod_base = OTHER; note = 2'-O-methyl ribonucleotide
  modified_base 101: mod_base = OTHER; note = uniform ribonucleotides (A, C, G, inosine or U), deoxynucleotides (A, G, C, inosine or T), ribonebularine, 2'-O-methylnebularine or deoxynebularine
  modified_base 102: mod_base = OTHER; note = uniform ribonucleotides (A, C, G, inosine or U), deoxynucleotides (A, G, C, inosine or T), ribonebularine, 2'-O-methylnebularine or deoxynebularine
  modified_base 103: mod_base = OTHER; note = uniform ribonucleotides (A, C, G, inosine or U), deoxynucleotides (A, G, C, inosine or T), ribonebularine, 2'-O-methylnebularine or deoxynebularine
  modified_base 1..4: mod_base = OTHER; note = phosphorothioate linkage
  modified_base 25..26: mod_base = OTHER; note = phosphorothioate linkage
  modified_base 64..65: mod_base = OTHER; note = phosphorothioate linkage
  modified_base 97..100: mod_base = OTHER; note = phosphorothioate linkage
  misc_feature 1..100: note = RNA
  misc_feature 101..103: note = Optionally DNA or RNA

SEQ ID NO: 2869 - DNA, 103 bp, synthetic construct; identical to SEQ ID NO: 1797
  source 1..103: mol_type = other DNA
  modified_base 1: mod_base = OTHER; note = 2'-O-methyl ribonucleotide
  modified_base 2: mod_base = OTHER; note = 2'-O-methyl ribonucleotide
  modified_base 3: mod_base = OTHER; note = 2'-O-methyl ribonucleotide
  modified_base 21: mod_base = OTHER; note = 2'-O-methyl ribonucleotide
  modified_base 28: mod_base = OTHER; note = 2'-O-methyl ribonucleotide
  modified_base 29: mod_base = OTHER; note = 2'-O-methyl ribonucleotide
  modified_base 30: mod_base = OTHER; note = 2'-O-methyl ribonucleotide
  modified_base 31: mod_base = OTHER; note = 2'-O-methyl ribonucleotide
  modified_base 32: mod_base = OTHER; note = 2'-O-methyl ribonucleotide
  modified_base 33: mod_base = OTHER; note = 2'-O-methyl ribonucleotide
  modified_base 34: mod_base = OTHER; note = 2'-O-methyl ribonucleotide
  modified_base 35: mod_base = OTHER; note = 2'-O-methyl ribonucleotide
  modified_base 36: mod_base = OTHER; note = 2'-O-methyl ribonucleotide
  modified_base 37: mod_base = OTHER; note = 2'-O-methyl ribonucleotide
  modified_base 38: mod_base = OTHER; note = 2'-O-methyl ribonucleotide
  modified_base 39: mod_base = OTHER; note = 2'-O-methyl ribonucleotide
  modified_base 40: mod_base = OTHER; note = 2'-O-methyl ribonucleotide
  modified_base 41: mod_base = OTHER; note = 2'-O-methyl ribonucleotide
  modified_base 42: mod_base = OTHER; note = 2'-O-methyl ribonucleotide
  modified_base 46: mod_base = OTHER; note = 2'-O-methyl ribonucleotide
  modified_base 48: mod_base = OTHER; note = 2'-O-methyl ribonucleotide
  modified_base 50: mod_base = OTHER; note = 2'-O-methyl ribonucleotide
  modified_base 52: mod_base = OTHER; note = 2'-O-methyl ribonucleotide
  modified_base 53: mod_base = OTHER; note = 2'-O-methyl ribonucleotide
  modified_base 54: mod_base = OTHER; note = 2'-O-methyl ribonucleotide
  modified_base 57: mod_base = OTHER; note = 2'-O-methyl ribonucleotide
  modified_base 61: mod_base = OTHER; note = 2'-O-methyl ribonucleotide
  modified_base 66: mod_base = OTHER; note = 2'-O-methyl ribonucleotide
  modified_base 67: mod_base = OTHER; note = 2'-O-methyl ribonucleotide
  modified_base 70: mod_base = OTHER; note = 2'-O-methyl ribonucleotide
  modified_base 71: mod_base = OTHER; note = 2'-O-methyl ribonucleotide
  modified_base 72: mod_base = OTHER; note = 2'-O-methyl ribonucleotide
  modified_base 74: mod_base = OTHER; note = 2'-O-methyl ribonucleotide
  modified_base 75: mod_base = OTHER; note = 2'-O-methyl ribonucleotide
  modified_base 76: mod_base = OTHER; note = 2'-O-methyl ribonucleotide
  modified_base 77: mod_base = OTHER; note = 2'-O-methyl ribonucleotide
  modified_base 78: mod_base = OTHER; note = 2'-O-methyl ribonucleotide
  modified_base 79: mod_base = OTHER; note = 2'-O-methyl ribonucleotide
  modified_base 80: mod_base = OTHER; note = 2'-O-methyl ribonucleotide
  modified_base 82: mod_base = OTHER; note = 2'-O-methyl ribonucleotide
  modified_base 83: mod_base = OTHER; note = 2'-O-methyl ribonucleotide
  modified_base 84: mod_base = OTHER; note = 2'-O-methyl ribonucleotide
  modified_base 85: mod_base = OTHER; note = 2'-O-methyl ribonucleotide
  modified_base 86: mod_base = OTHER; note = 2'-O-methyl ribonucleotide
  modified_base 87: mod_base = OTHER; note = 2'-O-methyl ribonucleotide
  modified_base 89: mod_base = OTHER; note = 2'-O-methyl ribonucleotide
  modified_base 92: mod_base = OTHER; note = 2'-O-methyl ribonucleotide
  modified_base 93: mod_base = OTHER; note = 2'-O-methyl ribonucleotide
  modified_base 94: mod_base = OTHER; note = 2'-O-methyl ribonucleotide
  modified_base 95: mod_base = OTHER; note = 2'-O-methyl ribonucleotide
  modified_base 96: mod_base = OTHER; note = 2'-O-methyl ribonucleotide
  modified_base 97: mod_base = OTHER; note = 2'-O-methyl ribonucleotide
  modified_base 98: mod_base = OTHER; note = 2'-O-methyl ribonucleotide
  modified_base 99: mod_base = OTHER; note = 2'-O-methyl ribonucleotide
  modified_base 100: mod_base = OTHER; note = 2'-O-methyl ribonucleotide
  modified_base 101: mod_base = OTHER; note = uniform ribonucleotides (A, C, G, inosine or U), deoxynucleotides (A, G, C, inosine or T), ribonebularine, 2'-O-methylnebularine or deoxynebularine
  modified_base 102: mod_base = OTHER; note = uniform ribonucleotides (A, C, G, inosine or U), deoxynucleotides (A, G, C, inosine or T), ribonebularine, 2'-O-methylnebularine or deoxynebularine
  modified_base 103: mod_base = OTHER; note = uniform ribonucleotides (A, C, G, inosine or U), deoxynucleotides (A, G, C, inosine or T), ribonebularine, 2'-O-methylnebularine or deoxynebularine
  modified_base 1..4: mod_base = OTHER; note = phosphorothioate linkage
  modified_base 25..26: mod_base = OTHER; note = phosphorothioate linkage
  modified_base 64..65: mod_base = OTHER; note = phosphorothioate linkage
  modified_base 97..100: mod_base = OTHER; note = phosphorothioate linkage
  misc_feature 1..100: note = RNA
  misc_feature 101..103: note = Optionally DNA or RNA

SEQ ID NO: 2870 - DNA, 103 bp, synthetic construct; identical to SEQ ID NO: 1797
  source 1..103: mol_type = other DNA
  modified_base 1: mod_base = OTHER; note = 2'-O-methyl ribonucleotide
  modified_base 2: mod_base = OTHER; note = 2'-O-methyl ribonucleotide
  modified_base 3: mod_base = OTHER; note = 2'-O-methyl ribonucleotide
  modified_base 21: mod_base = OTHER; note = 2'-O-methyl ribonucleotide
  modified_base 28: mod_base = OTHER; note = 2'-O-methyl ribonucleotide
  modified_base 29: mod_base = OTHER; note = 2'-O-methyl ribonucleotide
  modified_base 30: mod_base = OTHER; note = 2'-O-methyl ribonucleotide
  modified_base 31: mod_base = OTHER; note = 2'-O-methyl ribonucleotide
  modified_base 32: mod_base = OTHER; note = 2'-O-methyl ribonucleotide
  modified_base 33: mod_base = OTHER; note = 2'-O-methyl ribonucleotide
  modified_base 34: mod_base = OTHER; note = 2'-O-methyl ribonucleotide
  modified_base 35: mod_base = OTHER; note = 2'-O-methyl ribonucleotide
  modified_base 36: mod_base = OTHER; note = 2'-O-methyl ribonucleotide
  modified_base 37: mod_base = OTHER; note = 2'-O-methyl ribonucleotide
  modified_base 38: mod_base = OTHER; note = 2'-O-methyl ribonucleotide
  modified_base 39: mod_base = OTHER; note = 2'-O-methyl ribonucleotide
  modified_base 40: mod_base = OTHER; note = 2'-O-methyl ribonucleotide
  modified_base 41: mod_base = OTHER; note = 2'-O-methyl ribonucleotide
  modified_base 42: mod_base = OTHER; note = 2'-O-methyl ribonucleotide
  modified_base 46: mod_base = OTHER; note = 2'-O-methyl ribonucleotide
  modified_base 48: mod_base = OTHER; note = 2'-O-methyl ribonucleotide
  modified_base 50: mod_base = OTHER; note = 2'-O-methyl ribonucleotide
  modified_base 52: mod_base = OTHER; note = 2'-O-methyl ribonucleotide
  modified_base 53: mod_base = OTHER; note = 2'-O-methyl ribonucleotide
  modified_base 54: mod_base = OTHER; note = 2'-O-methyl ribonucleotide
  modified_base 55: mod_base = OTHER; note = 2'-O-methyl ribonucleotide
  modified_base 56: mod_base = OTHER; note = 2'-O-methyl ribonucleotide
  modified_base 57: mod_base = OTHER; note = 2'-O-methyl ribonucleotide
  modified_base 60: mod_base = OTHER; note = 2'-O-methyl ribonucleotide
  modified_base 61: mod_base = OTHER; note = 2'-O-methyl ribonucleotide
  modified_base 66: mod_base = OTHER; note = 2'-O-methyl ribonucleotide
  modified_base 67: mod_base = OTHER; note = 2'-O-methyl ribonucleotide
  modified_base 70: mod_base = OTHER; note = 2'-O-methyl ribonucleotide
  modified_base 71: mod_base = OTHER; note = 2'-O-methyl ribonucleotide
  modified_base 72: mod_base = OTHER; note = 2'-O-methyl ribonucleotide
  modified_base 74: mod_base = OTHER; note = 2'-O-methyl ribonucleotide
  modified_base 75: mod_base = OTHER; note = 2'-O-methyl ribonucleotide
  modified_base 76: mod_base = OTHER; note = 2'-O-methyl ribonucleotide
  modified_base 77: mod_base = OTHER; note = 2'-O-methyl ribonucleotide
  modified_base 78: mod_base = OTHER; note = 2'-O-methyl ribonucleotide
  modified_base 79: mod_base = OTHER; note = 2'-O-methyl ribonucleotide
  modified_base 80: mod_base = OTHER; note = 2'-O-methyl ribonucleotide
  modified_base 82: mod_base = OTHER; note = 2'-O-methyl ribonucleotide
  modified_base 83: mod_base = OTHER; note = 2'-O-methyl ribonucleotide
  modified_base 84: mod_base = OTHER; note = 2'-O-methyl ribonucleotide
  modified_base 85: mod_base = OTHER; note = 2'-O-methyl ribonucleotide
  modified_base 86: mod_base = OTHER; note = 2'-O-methyl ribonucleotide
  modified_base 87: mod_base = OTHER; note = 2'-O-methyl ribonucleotide
  modified_base 89: mod_base = OTHER; note = 2'-O-methyl ribonucleotide
  modified_base 92: mod_base = OTHER; note = 2'-O-methyl ribonucleotide
  modified_base 93: mod_base = OTHER; note = 2'-O-methyl ribonucleotide
  modified_base 94: mod_base = OTHER; note = 2'-O-methyl ribonucleotide
  modified_base 95: mod_base = OTHER; note = 2'-O-methyl ribonucleotide
  modified_base 96: mod_base = OTHER; note = 2'-O-methyl ribonucleotide
  modified_base 97: mod_base = OTHER; note = 2'-O-methyl ribonucleotide
  modified_base 98: mod_base = OTHER; note = 2'-O-methyl ribonucleotide
  modified_base 99: mod_base = OTHER; note = 2'-O-methyl ribonucleotide
  modified_base 100: mod_base = OTHER; note = 2'-O-methyl ribonucleotide
  modified_base 101: mod_base = OTHER; note = uniform ribonucleotides (A, C, G, inosine or U), deoxynucleotides (A, G, C, inosine or T), ribonebularine, 2'-O-methylnebularine or deoxynebularine
  modified_base 102: mod_base = OTHER; note = uniform ribonucleotides (A, C, G, inosine or U), deoxynucleotides (A, G, C, inosine or T), ribonebularine, 2'-O-methylnebularine or deoxynebularine
  modified_base 103: mod_base = OTHER; note = uniform ribonucleotides (A, C, G, inosine or U), deoxynucleotides (A, G, C, inosine or T), ribonebularine, 2'-O-methylnebularine or deoxynebularine
  modified_base 1..4: mod_base = OTHER; note = phosphorothioate linkage
  modified_base 25..26: mod_base = OTHER; note = phosphorothioate linkage
  modified_base 64..65: mod_base = OTHER; note = phosphorothioate linkage
  modified_base 97..100: mod_base = OTHER; note = phosphorothioate linkage
  misc_feature 1..100: note = RNA
  misc_feature 101..103: note = Optionally DNA or RNA

SEQ ID NO: 2871 - DNA, 103 bp, synthetic construct; identical to SEQ ID NO: 1797
  source 1..103: mol_type = other DNA
  modified_base 1: mod_base = OTHER; note = 2'-O-methyl ribonucleotide
  modified_base 2: mod_base = OTHER; note = 2'-O-methyl ribonucleotide
  modified_base 3: mod_base = OTHER; note = 2'-O-methyl ribonucleotide
  modified_base 21: mod_base = OTHER; note = 2'-O-methyl ribonucleotide
  modified_base 28: mod_base = OTHER; note = 2'-O-methyl ribonucleotide
  modified_base 29: mod_base = OTHER; note = 2'-O-methyl ribonucleotide
  modified_base 30: mod_base = OTHER; note = 2'-O-methyl ribonucleotide
  modified_base 31: mod_base = OTHER; note = 2'-O-methyl ribonucleotide
  modified_base 32: mod_base = OTHER; note = 2'-O-methyl ribonucleotide
  modified_base 33: mod_base = OTHER; note = 2'-O-methyl ribonucleotide
  modified_base 34: mod_base = OTHER; note = 2'-O-methyl ribonucleotide
  modified_base 35: mod_base = OTHER; note = 2'-O-methyl ribonucleotide
  modified_base 36: mod_base = OTHER; note = 2'-O-methyl ribonucleotide
  modified_base 37: mod_base = OTHER; note = 2'-O-methyl ribonucleotide
  modified_base 38: mod_base = OTHER; note = 2'-O-methyl ribonucleotide
  modified_base 39: mod_base = OTHER; note = 2'-O-methyl ribonucleotide
  modified_base 40: mod_base = OTHER; note = 2'-O-methyl ribonucleotide
  modified_base 41: mod_base = OTHER; note = 2'-O-methyl ribonucleotide
  modified_base 42: mod_base = OTHER; note = 2'-O-methyl ribonucleotide
  modified_base 46: mod_base = OTHER; note = 2'-O-methyl ribonucleotide
  modified_base 48: mod_base = OTHER; note = 2'-O-methyl ribonucleotide
  modified_base 50: mod_base = OTHER; note = 2'-O-methyl ribonucleotide
  modified_base 52: mod_base = OTHER; note = 2'-O-methyl ribonucleotide
  modified_base 53: mod_base = OTHER; note = 2'-O-methyl ribonucleotide
  modified_base 54: mod_base = OTHER; note = 2'-O-methyl ribonucleotide
  modified_base 57: mod_base = OTHER; note = 2'-O-methyl ribonucleotide
  modified_base 61: mod_base = OTHER; note = 2'-O-methyl ribonucleotide
  modified_base 66: mod_base = OTHER; note = 2'-O-methyl ribonucleotide
  modified_base 67: mod_base = OTHER; note = 2'-O-methyl ribonucleotide
  modified_base 70: mod_base = OTHER; note = 2'-O-methyl ribonucleotide
  modified_base 71: mod_base = OTHER; note = 2'-O-methyl ribonucleotide
  modified_base 72: mod_base = OTHER; note = 2'-O-methyl ribonucleotide
  modified_base 73: mod_base = OTHER; note = 2'-O-methyl ribonucleotide
  modified_base 74: mod_base = OTHER; note = 2'-O-methyl ribonucleotide
  modified_base 75: mod_base = OTHER; note = 2'-O-methyl ribonucleotide
  modified_base 76: mod_base = OTHER; note = 2'-O-methyl ribonucleotide
  modified_base 77: mod_base = OTHER; note = 2'-O-methyl ribonucleotide
  modified_base 78: mod_base = OTHER; note = 2'-O-methyl ribonucleotide
  modified_base 79: mod_base = OTHER; note = 2'-O-methyl ribonucleotide
  modified_base 80: mod_base = OTHER; note = 2'-O-methyl ribonucleotide
  modified_base 82: mod_base = OTHER; note = 2'-O-methyl ribonucleotide
  modified_base 83: mod_base = OTHER; note = 2'-O-methyl ribonucleotide
  modified_base 84: mod_base = OTHER; note = 2'-O-methyl ribonucleotide
  modified_base 85: mod_base = OTHER; note = 2'-O-methyl ribonucleotide
  modified_base 86: mod_base = OTHER; note = 2'-O-methyl ribonucleotide
  modified_base 87: mod_base = OTHER; note = 2'-O-methyl ribonucleotide
  modified_base 89: mod_base = OTHER; note = 2'-O-methyl ribonucleotide
  modified_base 92: mod_base = OTHER; note = 2'-O-methyl ribonucleotide
  modified_base 93: mod_base = OTHER; note = 2'-O-methyl ribonucleotide
  modified_base 94: mod_base = OTHER; note = 2'-O-methyl ribonucleotide
  modified_base 95: mod_base = OTHER; note = 2'-O-methyl ribonucleotide
  modified_base 96: mod_base = OTHER; note = 2'-O-methyl ribonucleotide
  modified_base 97: mod_base = OTHER; note = 2'-O-methyl ribonucleotide
  modified_base 98: mod_base = OTHER; note = 2'-O-methyl ribonucleotide
  modified_base 99: mod_base = OTHER; note = 2'-O-methyl ribonucleotide
  modified_base 100: mod_base = OTHER; note = 2'-O-methyl ribonucleotide
  modified_base 101: mod_base = OTHER; note = uniform ribonucleotides (A, C, G, inosine or U), deoxynucleotides (A, G, C, inosine or T), ribonebularine, 2'-O-methylnebularine or deoxynebularine
  modified_base 102: mod_base = OTHER; note = uniform ribonucleotides (A, C, G, inosine or U), deoxynucleotides (A, G, C, inosine or T), ribonebularine, 2'-O-methylnebularine or deoxynebularine
  modified_base 103: mod_base = OTHER; note = uniform ribonucleotides (A, C, G, inosine or U), deoxynucleotides (A, G, C, inosine or T), ribonebularine, 2'-O-methylnebularine or deoxynebularine
  modified_base 1..4: mod_base = OTHER; note = phosphorothioate linkage
  modified_base 25..26: mod_base = OTHER; note = phosphorothioate linkage
  modified_base 64..65: mod_base = OTHER; note = phosphorothioate linkage
  modified_base 97..100: mod_base = OTHER; note = phosphorothioate linkage
  misc_feature 1..100: note = RNA
  misc_feature 101..103: note = Optionally DNA or RNA

SEQ ID NO: 2872 - DNA, 103 bp, synthetic construct; identical to SEQ ID NO: 1797
  source 1..103: mol_type = other DNA
  modified_base 1: mod_base = OTHER; note = 2'-O-methyl ribonucleotide
  modified_base 2: mod_base = OTHER; note = 2'-O-methyl ribonucleotide
  modified_base 3: mod_base = OTHER; note = 2'-O-methyl ribonucleotide
  modified_base 21: mod_base = OTHER; note = 2'-O-methyl ribonucleotide
  modified_base 28: mod_base = OTHER; note = 2'-O-methyl ribonucleotide
  modified_base 29: mod_base = OTHER; note = 2'-O-methyl ribonucleotide
  modified_base 30: mod_base = OTHER; note = 2'-O-methyl ribonucleotide
  modified_base 31: mod_base = OTHER; note = 2'-O-methyl ribonucleotide
  modified_base 32: mod_base = OTHER; note = 2'-O-methyl ribonucleotide
  modified_base 33: mod_base = OTHER; note = 2'-O-methyl ribonucleotide
  modified_base 34: mod_base = OTHER; note = 2'-O-methyl ribonucleotide
  modified_base 35: mod_base = OTHER; note = 2'-O-methyl ribonucleotide
  modified_base 36: mod_base = OTHER; note = 2'-O-methyl ribonucleotide
  modified_base 37: mod_base = OTHER; note = 2'-O-methyl ribonucleotide
  modified_base 38: mod_base = OTHER; note = 2'-O-methyl ribonucleotide
  modified_base 39: mod_base = OTHER; note = 2'-O-methyl ribonucleotide
  modified_base 40: mod_base = OTHER; note = 2'-O-methyl ribonucleotide
  modified_base 41: mod_base = OTHER; note = 2'-O-methyl ribonucleotide
  modified_base 42: mod_base = OTHER; note = 2'-O-methyl ribonucleotide
  modified_base 46: mod_base = OTHER; note = 2'-O-methyl ribonucleotide
  modified_base 48: mod_base = OTHER; note = 2'-O-methyl ribonucleotide
  modified_base 50: mod_base = OTHER; note = 2'-O-methyl ribonucleotide
  modified_base 52: mod_base = OTHER; note = 2'-O-methyl ribonucleotide
  modified_base 53: mod_base = OTHER; note = 2'-O-methyl ribonucleotide
  modified_base 54: mod_base = OTHER; note = 2'-O-methyl ribonucleotide
  modified_base 57: mod_base = OTHER; note = 2'-O-methyl ribonucleotide
  modified_base 61: mod_base = OTHER; note = 2'-O-methyl ribonucleotide
  modified_base 66: mod_base = OTHER; note = 2'-O-methyl ribonucleotide
  modified_base 67: mod_base = OTHER; note = 2'-O-methyl ribonucleotide
  modified_base 70: mod_base = OTHER; note = 2'-O-methyl ribonucleotide
  modified_base 71: mod_base = OTHER; note = 2'-O-methyl ribonucleotide
  modified_base 72: mod_base = OTHER; note = 2'-O-methyl ribonucleotide
  modified_base 73: mod_base = OTHER; note = 2'-O-methyl ribonucleotide
  modified_base 74: mod_base = OTHER; note = 2'-O-methyl ribonucleotide
  modified_base 75: mod_base = OTHER; note = 2'-O-methyl ribonucleotide
  modified_base 76: mod_base = OTHER; note = 2'-O-methyl ribonucleotide
  modified_base 77: mod_base = OTHER; note = 2'-O-methyl ribonucleotide
  modified_base 78: mod_base = OTHER; note = 2'-O-methyl ribonucleotide
  modified_base 79: mod_base = OTHER; note = 2'-O-methyl ribonucleotide
  modified_base 80: mod_base = OTHER; note = 2'-O-methyl ribonucleotide
  modified_base 82: mod_base = OTHER; note = 2'-O-methyl ribonucleotide
  modified_base 83: mod_base = OTHER; note = 2'-O-methyl ribonucleotide
  modified_base 84: mod_base = OTHER; note = 2'-O-methyl ribonucleotide
  modified_base 85: mod_base = OTHER; note = 2'-O-methyl ribonucleotide
  modified_base 86: mod_base = OTHER; note = 2'-O-methyl ribonucleotide
  modified_base 87: mod_base = OTHER; note = 2'-O-methyl ribonucleotide
  modified_base 89: mod_base = OTHER; note = 2'-O-methyl ribonucleotide
  modified_base 91: mod_base = OTHER; note = 2'-O-methyl ribonucleotide
  modified_base 92: mod_base = OTHER; note = 2'-O-methyl ribonucleotide
  modified_base 93: mod_base = OTHER; note = 2'-O-methyl ribonucleotide
  modified_base 94: mod_base = OTHER; note = 2'-O-methyl ribonucleotide
  modified_base 95: mod_base = OTHER; note = 2'-O-methyl ribonucleotide
  modified_base 96: mod_base = OTHER; note = 2'-O-methyl ribonucleotide
  modified_base 97: mod_base = OTHER; note = 2'-O-methyl ribonucleotide
  modified_base 98: mod_base = OTHER; note = 2'-O-methyl ribonucleotide
  modified_base 99: mod_base = OTHER; note = 2'-O-methyl ribonucleotide
  modified_base 100: mod_base = OTHER; note = 2'-O-methyl ribonucleotide
  modified_base 101: mod_base = OTHER; note = uniform ribonucleotides (A, C, G, inosine or U), deoxynucleotides (A, G, C, inosine or T), ribonebularine, 2'-O-methylnebularine or deoxynebularine
  modified_base 102: mod_base = OTHER; note = uniform ribonucleotides (A, C, G, inosine or U), deoxynucleotides (A, G, C, inosine or T), ribonebularine, 2'-O-methylnebularine or deoxynebularine
  modified_base 103: mod_base = OTHER; note = uniform ribonucleotides (A, C, G, inosine or U), deoxynucleotides (A, G, C, inosine or T), ribonebularine, 2'-O-methylnebularine or deoxynebularine
  modified_base 1..4: mod_base = OTHER; note = phosphorothioate linkage
  modified_base 25..26: mod_base = OTHER; note = phosphorothioate linkage
  modified_base 64..65: mod_base = OTHER; note = phosphorothioate linkage
  modified_base 97..100: mod_base = OTHER; note = phosphorothioate linkage
  misc_feature 1..100: note = RNA
  misc_feature 101..103: note = Optionally DNA or RNA

SEQ ID NO: 2873 - DNA, 103 bp, synthetic construct; identical to SEQ ID NO: 1797
  source 1..103: mol_type = other DNA
  modified_base 1: mod_base = OTHER; note = 2'-O-methyl ribonucleotide
  modified_base 2: mod_base = OTHER; note = 2'-O-methyl ribonucleotide
  modified_base 3: mod_base = OTHER; note = 2'-O-methyl ribonucleotide
  modified_base 21: mod_base = OTHER; note = 2'-O-methyl ribonucleotide
  modified_base 28: mod_base = OTHER; note = 2'-O-methyl ribonucleotide
  modified_base 29: mod_base = OTHER; note = 2'-O-methyl ribonucleotide
  modified_base 30: mod_base = OTHER; note = 2'-O-methyl ribonucleotide
  modified_base 31: mod_base = OTHER; note = 2'-O-methyl ribonucleotide
  modified_base 32: mod_base = OTHER; note = 2'-O-methyl ribonucleotide
  modified_base 34: mod_base = OTHER; note = 2'-O-methyl ribonucleotide
  modified_base 35: mod_base = OTHER; note = 2'-O-methyl ribonucleotide
  modified_base 36: mod_base = OTHER; note = 2'-O-methyl ribonucleotide
  modified_base 37: mod_base = OTHER; note = 2'-O-methyl ribonucleotide
  modified_base 38: mod_base = OTHER; note = 2'-O-methyl ribonucleotide
  modified_base 39: mod_base = OTHER; note = 2'-O-methyl ribonucleotide
  modified_base 40: mod_base = OTHER; note = 2'-O-methyl ribonucleotide
  modified_base 41: mod_base = OTHER; note = 2'-O-methyl ribonucleotide
  modified_base 42: mod_base = OTHER; note = 2'-O-methyl ribonucleotide
  modified_base 46: mod_base = OTHER; note = 2'-O-methyl ribonucleotide
  modified_base 48: mod_base = OTHER; note = 2'-O-methyl ribonucleotide
  modified_base 50: mod_base = OTHER; note = 2'-O-methyl ribonucleotide
  modified_base 52: mod_base = OTHER; note = 2'-O-methyl ribonucleotide
  modified_base 53: mod_base = OTHER; note = 2'-O-methyl ribonucleotide
  modified_base 54: mod_base = OTHER; note = 2'-O-methyl ribonucleotide
  modified_base 57: mod_base = OTHER; note = 2'-O-methyl ribonucleotide
  modified_base 61: mod_base = OTHER; note = 2'-O-methyl ribonucleotide
  modified_base 66: mod_base = OTHER; note = 2'-O-methyl ribonucleotide
  modified_base 67: mod_base = OTHER; note = 2'-O-methyl ribonucleotide
  modified_base 70: mod_base = OTHER; note = 2'-O-methyl ribonucleotide
  modified_base 71: mod_base = OTHER; note = 2'-O-methyl ribonucleotide
  modified_base 72: mod_base = OTHER; note = 2'-O-methyl ribonucleotide
  modified_base 73: mod_base = OTHER; note = 2'-O-methyl ribonucleotide
  modified_base 74: mod_base = OTHER; note = 2'-O-methyl ribonucleotide
  modified_base 75: mod_base = OTHER; note = 2'-O-methyl ribonucleotide
  modified_base 76: mod_base = OTHER; note = 2'-O-methyl ribonucleotide
  modified_base 77: mod_base = OTHER; note = 2'-O-methyl ribonucleotide
  modified_base 78: mod_base = OTHER; note = 2'-O-methyl ribonucleotide
  modified_base 79: mod_base = OTHER; note = 2'-O-methyl ribonucleotide
  modified_base 80: mod_base = OTHER; note = 2'-O-methyl ribonucleotide
  modified_base 82: mod_base = OTHER; note = 2'-O-methyl ribonucleotide
  modified_base 83: mod_base = OTHER; note = 2'-O-methyl ribonucleotide
  modified_base 84: mod_base = OTHER; note = 2'-O-methyl ribonucleotide
  modified_base 85: mod_base = OTHER; note = 2'-O-methyl ribonucleotide
  modified_base 86: mod_base = OTHER; note = 2'-O-methyl ribonucleotide
  modified_base 87: mod_base = OTHER; note = 2'-O-methyl ribonucleotide
  modified_base 89: mod_base = OTHER; note = 2'-O-methyl ribonucleotide
  modified_base 92: mod_base = OTHER; note = 2'-O-methyl ribonucleotide
  modified_base 93: mod_base = OTHER; note = 2'-O-methyl ribonucleotide
  modified_base 94: mod_base = OTHER; note = 2'-O-methyl ribonucleotide
  modified_base 95: mod_base = OTHER; note = 2'-O-methyl ribonucleotide
  modified_base 96: mod_base = OTHER; note = 2'-O-methyl ribonucleotide
  modified_base 97: mod_base = OTHER; note = 2'-O-methyl ribonucleotide
  modified_base 98: mod_base = OTHER; note = 2'-O-methyl ribonucleotide
  modified_base 99: mod_base = OTHER; note = 2'-O-methyl ribonucleotide
  modified_base 100: mod_base = OTHER; note = 2'-O-methyl ribonucleotide
  modified_base 101: mod_base = OTHER; note = uniform ribonucleotides (A, C, G, inosine or U), deoxynucleotides (A, G, C, inosine or T), ribonebularine, 2'-O-methylnebularine or deoxynebularine
  modified_base 102: mod_base = OTHER; note = uniform ribonucleotides (A, C, G, inosine or U), deoxynucleotides (A, G, C, inosine or T), ribonebularine, 2'-O-methylnebularine or deoxynebularine
  modified_base 103: mod_base = OTHER; note = uniform ribonucleotides (A, C, G, inosine or U), deoxynucleotides (A, G, C, inosine or T), ribonebularine, 2'-O-methylnebularine or deoxynebularine
  modified_base 1..4: mod_base = OTHER; note = phosphorothioate linkage
  modified_base 25..26: mod_base = OTHER; note = phosphorothioate linkage
  modified_base 64..65: mod_base = OTHER; note = phosphorothioate linkage
  modified_base 97..100: mod_base = OTHER; note = phosphorothioate linkage
  misc_feature 1..100: note = RNA
  misc_feature 101..103: note = Optionally DNA or RNA

SEQ ID NO: 2874 - DNA, 103 bp, synthetic construct; identical to SEQ ID NO: 1797
  source 1..103: mol_type = other DNA
  modified_base 1: mod_base = OTHER; note = 2'-O-methyl ribonucleotide
  modified_base 2: mod_base = OTHER; note = 2'-O-methyl ribonucleotide
  modified_base 3: mod_base = OTHER; note = 2'-O-methyl ribonucleotide
  modified_base 21: mod_base = OTHER; note = 2'-O-methyl ribonucleotide
  modified_base 28: mod_base = OTHER; note = 2'-O-methyl ribonucleotide
  modified_base 29: mod_base = OTHER; note = 2'-O-methyl ribonucleotide
  modified_base 30: mod_base = OTHER; note = 2'-O-methyl ribonucleotide
  modified_base 31: mod_base = OTHER; note = 2'-O-methyl ribonucleotide
  modified_base 32: mod_base = OTHER; note = 2'-O-methyl ribonucleotide
  modified_base 34: mod_base = OTHER; note = 2'-O-methyl ribonucleotide
  modified_base 35: mod_base = OTHER; note = 2'-O-methyl ribonucleotide
  modified_base 36: mod_base = OTHER; note = 2'-O-methyl ribonucleotide
  modified_base 37: mod_base = OTHER; note = 2'-O-methyl ribonucleotide
  modified_base 38: mod_base = OTHER; note = 2'-O-methyl ribonucleotide
  modified_base 39: mod_base = OTHER; note = 2'-O-methyl ribonucleotide
  modified_base 40: mod_base = OTHER; note = 2'-O-methyl ribonucleotide
  modified_base 41: mod_base = OTHER; note = 2'-O-methyl ribonucleotide
  modified_base 42: mod_base = OTHER; note = 2'-O-methyl ribonucleotide
  modified_base 46: mod_base = OTHER; note = 2'-O-methyl ribonucleotide
  modified_base 48: mod_base = OTHER; note = 2'-O-methyl ribonucleotide
  modified_base 50: mod_base = OTHER; note = 2'-O-methyl ribonucleotide
  modified_base 52: mod_base = OTHER; note = 2'-O-methyl ribonucleotide
  modified_base 53: mod_base = OTHER; note = 2'-O-methyl ribonucleotide
  modified_base 54: mod_base = OTHER; note = 2'-O-methyl ribonucleotide
  modified_base 57: mod_base = OTHER; note = 2'-O-methyl ribonucleotide
  modified_base 61: mod_base = OTHER; note = 2'-O-methyl ribonucleotide
  modified_base 66: mod_base = OTHER; note = 2'-O-methyl ribonucleotide
  modified_base 67: mod_base = OTHER; note = 2'-O-methyl ribonucleotide
  modified_base 70: mod_base = OTHER; note = 2'-O-methyl ribonucleotide
  modified_base 71: mod_base = OTHER; note = 2'-O-methyl ribonucleotide
  modified_base 72: mod_base = OTHER; note = 2'-O-methyl ribonucleotide
  modified_base 73: mod_base = OTHER; note = 2'-O-methyl ribonucleotide
  modified_base 74: mod_base = OTHER; note = 2'-O-methyl ribonucleotide
  modified_base 75: mod_base = OTHER; note = 2'-O-methyl ribonucleotide
  modified_base 76: mod_base = OTHER; note = 2'-O-methyl ribonucleotide
  modified_base 77: mod_base = OTHER; note = 2'-O-methyl ribonucleotide
  modified_base 78: mod_base = OTHER; note = 2'-O-methyl ribonucleotide
  modified_base 79: mod_base = OTHER; note = 2'-O-methyl ribonucleotide
  modified_base 80: mod_base = OTHER; note = 2'-O-methyl ribonucleotide
  modified_base 82: mod_base = OTHER; note = 2'-O-methyl ribonucleotide
  modified_base 83: mod_base = OTHER; note = 2'-O-methyl ribonucleotide
  modified_base 84: mod_base = OTHER; note = 2'-O-methyl ribonucleotide
  modified_base 85: mod_base = OTHER; note = 2'-O-methyl ribonucleotide
  modified_base 86: mod_base = OTHER; note = 2'-O-methyl ribonucleotide
  modified_base 87: mod_base = OTHER; note = 2'-O-methyl ribonucleotide
  modified_base 89: mod_base = OTHER; note = 2'-O-methyl ribonucleotide
  modified_base 91: mod_base = OTHER; note = 2'-O-methyl ribonucleotide
  modified_base 92: mod_base = OTHER; note = 2'-O-methyl ribonucleotide
  modified_base 93: mod_base = OTHER; note = 2'-O-methyl ribonucleotide
  modified_base 94: mod_base = OTHER; note = 2'-O-methyl ribonucleotide
  modified_base 95: mod_base = OTHER; note = 2'-O-methyl ribonucleotide
  modified_base 96: mod_base = OTHER; note = 2'-O-methyl ribonucleotide
  modified_base 97: mod_base = OTHER; note = 2'-O-methyl ribonucleotide
  modified_base 98: mod_base = OTHER; note = 2'-O-methyl ribonucleotide
  modified_base 99: mod_base = OTHER; note = 2'-O-methyl ribonucleotide
  modified_base 100: mod_base = OTHER; note = 2'-O-methyl ribonucleotide
  modified_base 101: mod_base = OTHER; note = uniform ribonucleotides (A, C, G, inosine or U), deoxynucleotides (A, G, C, inosine or T), ribonebularine, 2'-O-methylnebularine or deoxynebularine
  modified_base 102: mod_base = OTHER; note = uniform ribonucleotides (A, C, G, inosine or U), deoxynucleotides (A, G, C, inosine or T), ribonebularine, 2'-O-methylnebularine or deoxynebularine
  modified_base 103: mod_base = OTHER; note = uniform ribonucleotides (A, C, G, inosine or U), deoxynucleotides (A, G, C, inosine or T), ribonebularine, 2'-O-methylnebularine or deoxynebularine
  modified_base 1..4: mod_base = OTHER; note = phosphorothioate linkage
  modified_base 25..26: mod_base = OTHER; note = phosphorothioate linkage
  modified_base 64..65: mod_base = OTHER; note = phosphorothioate linkage
  modified_base 97..100: mod_base = OTHER; note = phosphorothioate linkage
  misc_feature 1..100: note = RNA
  misc_feature 101..103: note = Optionally DNA or RNA

SEQ ID NO: 2875 - DNA, 103 bp, synthetic construct; identical to SEQ ID NO: 1797
  source 1..103: mol_type = other DNA
  modified_base 1: mod_base = OTHER; note = 2'-O-methyl ribonucleotide
  modified_base 2: mod_base = OTHER; note = 2'-O-methyl ribonucleotide
  modified_base 3: mod_base = OTHER; note = 2'-O-methyl ribonucleotide
  modified_base 21: mod_base = OTHER; note = 2'-O-methyl ribonucleotide
  modified_base 28: mod_base = OTHER; note = 2'-O-methyl ribonucleotide
  modified_base 29: mod_base = OTHER; note = 2'-O-methyl ribonucleotide
  modified_base 30: mod_base = OTHER; note = 2'-O-methyl ribonucleotide
  modified_base 31: mod_base = OTHER; note = 2'-O-methyl ribonucleotide
  modified_base 32: mod_base = OTHER; note = 2'-O-methyl ribonucleotide
  modified_base 34: mod_base = OTHER; note = 2'-O-methyl ribonucleotide
  modified_base 35: mod_base = OTHER; note = 2'-O-methyl ribonucleotide
  modified_base 36: mod_base = OTHER; note = 2'-O-methyl ribonucleotide
  modified_base 37: mod_base = OTHER; note = 2'-O-methyl ribonucleotide
  modified_base 38: mod_base = OTHER; note = 2'-O-methyl ribonucleotide
  modified_base 39: mod_base = OTHER; note = 2'-O-methyl ribonucleotide
  modified_base 40: mod_base = OTHER; note = 2'-O-methyl ribonucleotide
  modified_base 41: mod_base = OTHER; note = 2'-O-methyl ribonucleotide
  modified_base 42: mod_base = OTHER; note = 2'-O-methyl ribonucleotide
  modified_base 46: mod_base = OTHER; note = 2'-O-methyl ribonucleotide
  modified_base 48: mod_base = OTHER; note = 2'-O-methyl ribonucleotide
  modified_base 50: mod_base = OTHER; note = 2'-O-methyl ribonucleotide
  modified_base 52: mod_base = OTHER; note = 2'-O-methyl ribonucleotide
  modified_base 53: mod_base = OTHER; note = 2'-O-methyl ribonucleotide
  modified_base 54: mod_base = OTHER; note = 2'-O-methyl ribonucleotide
  modified_base 55: mod_base = OTHER; note = 2'-O-methyl ribonucleotide
  modified_base 56: mod_base = OTHER; note = 2'-O-methyl ribonucleotide
  modified_base 57: mod_base = OTHER; note = 2'-O-methyl ribonucleotide
  modified_base 60: mod_base = OTHER; note = 2'-O-methyl ribonucleotide
  modified_base 61: mod_base = OTHER; note = 2'-O-methyl ribonucleotide
  modified_base 66: mod_base = OTHER; note = 2'-O-methyl ribonucleotide
  modified_base 67: mod_base = OTHER; note = 2'-O-methyl ribonucleotide
  modified_base 70: mod_base = OTHER; note = 2'-O-methyl ribonucleotide
  modified_base 71: mod_base = OTHER; note = 2'-O-methyl ribonucleotide
  modified_base 72: mod_base = OTHER; note = 2'-O-methyl ribonucleotide
  modified_base 74: mod_base = OTHER; note = 2'-O-methyl ribonucleotide
  modified_base 75: mod_base = OTHER; note = 2'-O-methyl ribonucleotide
  modified_base 76: mod_base = OTHER; note = 2'-O-methyl ribonucleotide
  modified_base 77: mod_base = OTHER; note = 2'-O-methyl ribonucleotide
  modified_base 78: mod_base = OTHER; note = 2'-O-methyl ribonucleotide
  modified_base 79: mod_base = OTHER; note = 2'-O-methyl ribonucleotide
  modified_base 80: mod_base = OTHER; note = 2'-O-methyl ribonucleotide
  modified_base 82: mod_base = OTHER; note = 2'-O-methyl ribonucleotide
  modified_base 83: mod_base = OTHER; note = 2'-O-methyl ribonucleotide
  modified_base 84: mod_base = OTHER; note = 2'-O-methyl ribonucleotide
  modified_base 85: mod_base = OTHER; note = 2'-O-methyl ribonucleotide
  modified_base 86: mod_base = OTHER; note = 2'-O-methyl ribonucleotide
  modified_base 87: mod_base = OTHER; note = 2'-O-methyl ribonucleotide
  modified_base 89: mod_base = OTHER; note = 2'-O-methyl ribonucleotide
  modified_base 92: mod_base = OTHER; note = 2'-O-methyl ribonucleotide
  modified_base 93: mod_base = OTHER; note = 2'-O-methyl ribonucleotide
  modified_base 94: mod_base = OTHER; note = 2'-O-methyl ribonucleotide
  modified_base 95: mod_base = OTHER; note = 2'-O-methyl ribonucleotide
  modified_base 96: mod_base = OTHER; note = 2'-O-methyl ribonucleotide
  modified_base 97: mod_base = OTHER; note = 2'-O-methyl ribonucleotide
  modified_base 98: mod_base = OTHER; note = 2'-O-methyl ribonucleotide
  modified_base 99: mod_base = OTHER; note = 2'-O-methyl ribonucleotide
  modified_base 100: mod_base = OTHER; note = 2'-O-methyl ribonucleotide
  modified_base 101: mod_base = OTHER; note = uniform ribonucleotides (A, C, G, inosine or U), deoxynucleotides (A, G, C, inosine or T), ribonebularine, 2'-O-methylnebularine or deoxynebularine
  modified_base 102: mod_base = OTHER; note = uniform ribonucleotides (A, C, G, inosine or U), deoxynucleotides (A, G, C, inosine or T), ribonebularine, 2'-O-methylnebularine or deoxynebularine
  modified_base 103: mod_base = OTHER; note = uniform ribonucleotides (A, C, G, inosine or U), deoxynucleotides (A, G, C, inosine or T), ribonebularine, 2'-O-methylnebularine or deoxynebularine
  modified_base 1..4: mod_base = OTHER; note = phosphorothioate linkage
  modified_base 25..26: mod_base = OTHER; note = phosphorothioate linkage
  modified_base 64..65: mod_base = OTHER; note = phosphorothioate linkage
  modified_base 97..100: mod_base = OTHER; note = phosphorothioate linkage
  misc_feature 1..100: note = RNA
  misc_feature 101..103: note = Optionally DNA or RNA

SEQ ID NO: 2876 - DNA, 103 bp, synthetic construct; identical to SEQ ID NO: 1795
  source 1..103: mol_type = other DNA
  modified_base 1: mod_base = OTHER; note = 2'-O-methyl ribonucleotide
  modified_base 2: mod_base = OTHER; note = 2'-O-methyl ribonucleotide
  modified_base 3: mod_base = OTHER; note = 2'-O-methyl ribonucleotide
  modified_base 21: mod_base = OTHER; note = 2'-O-methyl ribonucleotide
  modified_base 28: mod_base = OTHER; note = 2'-O-methyl ribonucleotide
  modified_base 29: mod_base = OTHER; note = 2'-O-methyl ribonucleotide
  modified_base 30: mod_base = OTHER; note = 2'-O-methyl ribonucleotide
  modified_base 31: mod_base = OTHER; note = 2'-O-methyl ribonucleotide
  modified_base 32: mod_base = OTHER; note = 2'-O-methyl ribonucleotide
  modified_base 33: mod_base = OTHER; note = 2'-O-methyl ribonucleotide
  modified_base 34: mod_base = OTHER; note = 2'-O-methyl ribonucleotide
  modified_base 35: mod_base = OTHER; note = 2'-O-methyl ribonucleotide
  modified_base 36: mod_base = OTHER; note = 2'-O-methyl ribonucleotide
  modified_base 37: mod_base = OTHER; note = 2'-O-methyl ribonucleotide
  modified_base 38: mod_base = OTHER; note = 2'-O-methyl ribonucleotide
  modified_base 39: mod_base = OTHER; note = 2'-O-methyl ribonucleotide
  modified_base 40: mod_base = OTHER; note = 2'-O-methyl ribonucleotide
  modified_base 41: mod_base = OTHER; note = 2'-O-methyl ribonucleotide
  modified_base 42: mod_base = OTHER; note = 2'-O-methyl ribonucleotide
  modified_base 46: mod_base = OTHER; note = 2'-O-methyl ribonucleotide
  modified_base 48: mod_base = OTHER; note = 2'-O-methyl ribonucleotide
  modified_base 50: mod_base = OTHER; note = 2'-O-methyl ribonucleotide
  modified_base 52: mod_base = OTHER; note = 2'-O-methyl ribonucleotide
  modified_base 53: mod_base = OTHER; note = 2'-O-methyl ribonucleotide
  modified_base 54: mod_base = OTHER; note = 2'-O-methyl ribonucleotide
  modified_base 55: mod_base = OTHER; note = 2'-O-methyl ribonucleotide
  modified_base 56: mod_base = OTHER; note = 2'-O-methyl ribonucleotide
  modified_base 57: mod_base = OTHER; note = 2'-O-methyl ribonucleotide
  modified_base 60: mod_base = OTHER; note = 2'-O-methyl ribonucleotide
  modified_base 61: mod_base = OTHER; note = 2'-O-methyl ribonucleotide
  modified_base 66: mod_base = OTHER; note = 2'-O-methyl ribonucleotide
  modified_base 67: mod_base = OTHER; note = 2'-O-methyl ribonucleotide
  modified_base 70: mod_base = OTHER; note = 2'-O-methyl ribonucleotide
  modified_base 71: mod_base = OTHER; note = 2'-O-methyl ribonucleotide
  modified_base 72: mod_base = OTHER; note = 2'-O-methyl ribonucleotide
  modified_base 73: mod_base = OTHER; note = 2'-O-methyl ribonucleotide
  modified_base 74: mod_base = OTHER; note = 2'-O-methyl ribonucleotide
  modified_base 75: mod_base = OTHER; note = 2'-O-methyl ribonucleotide
  modified_base 76: mod_base = OTHER; note = 2'-O-methyl ribonucleotide
  modified_base 77: mod_base = OTHER; note = 2'-O-methyl ribonucleotide
  modified_base 78: mod_base = OTHER; note = 2'-O-methyl ribonucleotide
  modified_base 79: mod_base = OTHER; note = 2'-O-methyl ribonucleotide
  modified_base 80: mod_base = OTHER; note = 2'-O-methyl ribonucleotide
  modified_base 81: mod_base = OTHER; note = 2'-O-methyl ribonucleotide
  modified_base 83: mod_base = OTHER; note = 2'-O-methyl ribonucleotide
  modified_base 84: mod_base = OTHER; note = 2'-O-methyl ribonucleotide
  modified_base 85: mod_base = OTHER; note = 2'-O-methyl ribonucleotide
  modified_base 86: mod_base = OTHER; note = 2'-O-methyl ribonucleotide
  modified_base 87: mod_base = OTHER; note = 2'-O-methyl ribonucleotide
  modified_base 88: mod_base = OTHER; note = 2'-O-methyl ribonucleotide
  modified_base 89: mod_base = OTHER; note = 2'-O-methyl ribonucleotide
  modified_base 90: mod_base = OTHER; note = 2'-O-methyl ribonucleotide
  modified_base 91: mod_base = OTHER; note = 2'-O-methyl ribonucleotide
  modified_base 92: mod_base = OTHER; note = 2'-O-methyl ribonucleotide
  modified_base 93: mod_base = OTHER; note = 2'-O-methyl ribonucleotide
  modified_base 94: mod_base = OTHER; note = 2'-O-methyl ribonucleotide
  modified_base 95: mod_base = OTHER; note = 2'-O-methyl ribonucleotide
  modified_base 96: mod_base = OTHER; note = 2'-O-methyl ribonucleotide
  modified_base 97: mod_base = OTHER; note = 2'-O-methyl ribonucleotide
  modified_base 98: mod_base = OTHER; note = 2'-O-methyl ribonucleotide
  modified_base 99: mod_base = OTHER; note = 2'-O-methyl ribonucleotide
  modified_base 100: mod_base = OTHER; note = 2'-O-methyl ribonucleotide
  modified_base 101: mod_base = OTHER; note = uniform ribonucleotides (A, C, G, inosine or U), deoxynucleotides (A, G, C, inosine or T), ribonebularine, 2'-O-methylnebularine or deoxynebularine
  modified_base 102: mod_base = OTHER; note = uniform ribonucleotides (A, C, G, inosine or U), deoxynucleotides (A, G, C, inosine or T), ribonebularine, 2'-O-methylnebularine or deoxynebularine
  modified_base 103: mod_base = OTHER; note = uniform ribonucleotides (A, C, G, inosine or U), deoxynucleotides (A, G, C, inosine or T), ribonebularine, 2'-O-methylnebularine or deoxynebularine
  modified_base 1..4: mod_base = OTHER; note = phosphorothioate linkage
  modified_base 25..26: mod_base = OTHER; note = phosphorothioate linkage
  modified_base 45..46: mod_base = OTHER; note = phosphorothioate linkage
  modified_base 64..65: mod_base = OTHER; note = phosphorothioate linkage
  modified_base 97..100: mod_base = OTHER; note = phosphorothioate linkage
  misc_feature 1..100: note = RNA
  misc_feature 101..103: note = Optionally DNA or RNA

SEQ ID NO: 2877 - DNA, 103 bp, synthetic construct; identical to SEQ ID NO: 1795
  source 1..103: mol_type = other DNA
  modified_base 1: mod_base = OTHER; note = 2'-O-methyl ribonucleotide
  modified_base 2: mod_base = OTHER; note = 2'-O-methyl ribonucleotide
  modified_base 3: mod_base = OTHER; note = 2'-O-methyl ribonucleotide
  modified_base 21: mod_base = OTHER; note = 2'-O-methyl ribonucleotide
  modified_base 28: mod_base = OTHER; note = 2'-O-methyl ribonucleotide
  modified_base 29: mod_base = OTHER; note = 2'-O-methyl ribonucleotide
  modified_base 30: mod_base = OTHER; note = 2'-O-methyl ribonucleotide
  modified_base 31: mod_base = OTHER; note = 2'-O-methyl ribonucleotide
  modified_base 32: mod_base = OTHER; note = 2'-O-methyl ribonucleotide
  modified_base 34: mod_base = OTHER; note = 2'-O-methyl ribonucleotide
  modified_base 35: mod_base = OTHER; note = 2'-O-methyl ribonucleotide
  modified_base 36: mod_base = OTHER; note = 2'-O-methyl ribonucleotide
  modified_base 37: mod_base = OTHER; note = 2'-O-methyl ribonucleotide
  modified_base 38: mod_base = OTHER; note = 2'-O-methyl ribonucleotide
  modified_base 39: mod_base = OTHER; note = 2'-O-methyl ribonucleotide
  modified_base 40: mod_base = OTHER; note = 2'-O-methyl ribonucleotide
  modified_base 41: mod_base = OTHER; note = 2'-O-methyl ribonucleotide
  modified_base 42: mod_base = OTHER; note = 2'-O-methyl ribonucleotide
  modified_base 46: mod_base = OTHER; note = 2'-O-methyl ribonucleotide
  modified_base 48: mod_base = OTHER; note = 2'-O-methyl ribonucleotide
  modified_base 50: mod_base = OTHER; note = 2'-O-methyl ribonucleotide
  modified_base 52: mod_base = OTHER; note = 2'-O-methyl ribonucleotide
  modified_base 53: mod_base = OTHER; note = 2'-O-methyl ribonucleotide
  modified_base 54: mod_base = OTHER; note = 2'-O-methyl ribonucleotide
  modified_base 55: mod_base = OTHER; note = 2'-O-methyl ribonucleotide
  modified_base 56: mod_base = OTHER; note = 2'-O-methyl ribonucleotide
  modified_base 57: mod_base = OTHER; note = 2'-O-methyl ribonucleotide
  modified_base 60: mod_base = OTHER; note = 2'-O-methyl ribonucleotide
  modified_base 61: mod_base = OTHER; note = 2'-O-methyl ribonucleotide
  modified_base 66: mod_base = OTHER; note = 2'-O-methyl ribonucleotide
  modified_base 67: mod_base = OTHER; note = 2'-O-methyl ribonucleotide
  modified_base 70: mod_base = OTHER; note = 2'-O-methyl ribonucleotide
  modified_base 71: mod_base = OTHER; note = 2'-O-methyl ribonucleotide
  modified_base 72: mod_base = OTHER; note = 2'-O-methyl ribonucleotide
  modified_base 74: mod_base = OTHER; note = 2'-O-methyl ribonucleotide
  modified_base 75: mod_base = OTHER; note = 2'-O-methyl ribonucleotide
  modified_base 76: mod_base = OTHER; note = 2'-O-methyl ribonucleotide
  modified_base 77: mod_base = OTHER; note = 2'-O-methyl ribonucleotide
  modified_base 78: mod_base = OTHER; note = 2'-O-methyl ribonucleotide
  modified_base 79: mod_base = OTHER; note = 2'-O-methyl ribonucleotide
  modified_base 80: mod_base = OTHER; note = 2'-O-methyl ribonucleotide
  modified_base 81: mod_base = OTHER; note = 2'-O-methyl ribonucleotide
  modified_base 83: mod_base = OTHER; note = 2'-O-methyl ribonucleotide
  modified_base 84: mod_base = OTHER; note = 2'-O-methyl ribonucleotide
  modified_base 85: mod_base = OTHER; note = 2'-O-methyl ribonucleotide
  modified_base 86: mod_base = OTHER; note = 2'-O-methyl ribonucleotide
  modified_base 87: mod_base = OTHER; note = 2'-O-methyl ribonucleotide
  modified_base 88: mod_base = OTHER; note = 2'-O-methyl ribonucleotide
  modified_base 89: mod_base = OTHER; note = 2'-O-methyl ribonucleotide
  modified_base 90: mod_base = OTHER; note = 2'-O-methyl ribonucleotide
  modified_base 91: mod_base = OTHER; note = 2'-O-methyl ribonucleotide
  modified_base 92: mod_base = OTHER; note = 2'-O-methyl ribonucleotide
  modified_base 93: mod_base = OTHER; note = 2'-O-methyl ribonucleotide
  modified_base 94: mod_base = OTHER; note = 2'-O-methyl ribonucleotide
  modified_base 95: mod_base = OTHER; note = 2'-O-methyl ribonucleotide
  modified_base 96: mod_base = OTHER; note = 2'-O-methyl ribonucleotide
  modified_base 97: mod_base = OTHER; note = 2'-O-methyl ribonucleotide
  modified_base 98: mod_base = OTHER; note = 2'-O-methyl ribonucleotide
  modified_base 99: mod_base = OTHER; note = 2'-O-methyl ribonucleotide
  modified_base 100: mod_base = OTHER; note = 2'-O-methyl ribonucleotide
  modified_base 101: mod_base = OTHER; note = uniform ribonucleotides (A, C, G, inosine or U), deoxynucleotides (A, G, C, inosine or T), ribonebularine, 2'-O-methylnebularine or deoxynebularine
  modified_base 102: mod_base = OTHER; note = uniform ribonucleotides (A, C, G, inosine or U), deoxynucleotides (A, G, C, inosine or T), ribonebularine, 2'-O-methylnebularine or deoxynebularine
  modified_base 103: mod_base = OTHER; note = uniform ribonucleotides (A, C, G, inosine or U), deoxynucleotides (A, G, C, inosine or T), ribonebularine, 2'-O-methylnebularine or deoxynebularine
  modified_base 1..4: mod_base = OTHER; note = phosphorothioate linkage
  modified_base 25..26: mod_base = OTHER; note = phosphorothioate linkage
  modified_base 45..46: mod_base = OTHER; note = phosphorothioate linkage
  modified_base 64..65: mod_base = OTHER; note = phosphorothioate linkage
  modified_base 97..100: mod_base = OTHER; note = phosphorothioate linkage
  misc_feature 1..100: note = RNA
  misc_feature 101..103: note = Optionally DNA or RNA

SEQ ID NO: 2878 - DNA, 103 bp, synthetic construct; identical to SEQ ID NO: 1796
  source 1..103: mol_type = other DNA
  modified_base 1: mod_base = OTHER; note = 2'-O-methyl ribonucleotide
  modified_base 2: mod_base = OTHER; note = 2'-O-methyl ribonucleotide
  modified_base 3: mod_base = OTHER; note = 2'-O-methyl ribonucleotide
  modified_base 21: mod_base = OTHER; note = 2'-O-methyl ribonucleotide
  modified_base 28: mod_base = OTHER; note = 2'-O-methyl ribonucleotide
  modified_base 29: mod_base = OTHER; note = 2'-O-methyl ribonucleotide
  modified_base 30: mod_base = OTHER; note = 2'-O-methyl ribonucleotide
  modified_base 31: mod_base = OTHER; note = 2'-O-methyl ribonucleotide
  modified_base 32: mod_base = OTHER; note = 2'-O-methyl ribonucleotide
  modified_base 33: mod_base = OTHER; note = 2'-O-methyl ribonucleotide
  modified_base 34: mod_base = OTHER; note = 2'-O-methyl ribonucleotide
  modified_base 35: mod_base = OTHER; note = 2'-O-methyl ribonucleotide
  modified_base 36: mod_base = OTHER; note = 2'-O-methyl ribonucleotide
  modified_base 37: mod_base = OTHER; note = 2'-O-methyl ribonucleotide
  modified_base 38: mod_base = OTHER; note = 2'-O-methyl ribonucleotide
  modified_base 39: mod_base = OTHER; note = 2'-O-methyl ribonucleotide
  modified_base 40: mod_base = OTHER; note = 2'-O-methyl ribonucleotide
  modified_base 41: mod_base = OTHER; note = 2'-O-methyl ribonucleotide
  modified_base 42: mod_base = OTHER; note = 2'-O-methyl ribonucleotide
  modified_base 46: mod_base = OTHER; note = 2'-O-methyl ribonucleotide
  modified_base 48: mod_base = OTHER; note = 2'-O-methyl ribonucleotide
  modified_base 50: mod_base = OTHER; note = 2'-O-methyl ribonucleotide
  modified_base 52: mod_base = OTHER; note = 2'-O-methyl ribonucleotide
  modified_base 53: mod_base = OTHER; note = 2'-O-methyl ribonucleotide
  modified_base 54: mod_base = OTHER; note = 2'-O-methyl ribonucleotide
  modified_base 55: mod_base = OTHER; note = 2'-O-methyl ribonucleotide
  modified_base 56: mod_base = OTHER; note = 2'-O-methyl ribonucleotide
  modified_base 57: mod_base = OTHER; note = 2'-O-methyl ribonucleotide
  modified_base 60: mod_base = OTHER; note = 2'-O-methyl ribonucleotide
  modified_base 61: mod_base = OTHER; note = 2'-O-methyl ribonucleotide
  modified_base 66: mod_base = OTHER; note = 2'-O-methyl ribonucleotide
  modified_base 67: mod_base = OTHER; note = 2'-O-methyl ribonucleotide
  modified_base 70: mod_base = OTHER; note = 2'-O-methyl ribonucleotide
  modified_base 71: mod_base = OTHER; note = 2'-O-methyl ribonucleotide
  modified_base 72: mod_base = OTHER; note = 2'-O-methyl ribonucleotide
  modified_base 73: mod_base = OTHER; note = 2'-O-methyl ribonucleotide
  modified_base 74: mod_base = OTHER; note = 2'-O-methyl ribonucleotide
  modified_base 75: mod_base = OTHER; note = 2'-O-methyl ribonucleotide
  modified_base 76: mod_base = OTHER; note = 2'-O-methyl ribonucleotide
  modified_base 77: mod_base = OTHER; note = 2'-O-methyl ribonucleotide
  modified_base 78: mod_base = OTHER; note = 2'-O-methyl ribonucleotide
  modified_base 79: mod_base = OTHER; note = 2'-O-methyl ribonucleotide
  modified_base 80: mod_base = OTHER; note = 2'-O-methyl ribonucleotide
  modified_base 81: mod_base = OTHER; note = 2'-O-methyl ribonucleotide
  modified_base 83: mod_base = OTHER; note = 2'-O-methyl ribonucleotide
  modified_base 84: mod_base = OTHER; note = 2'-O-methyl ribonucleotide
  modified_base 85: mod_base = OTHER; note = 2'-O-methyl ribonucleotide
  modified_base 86: mod_base = OTHER; note = 2'-O-methyl ribonucleotide
  modified_base 87: mod_base = OTHER; note = 2'-O-methyl ribonucleotide
  modified_base 88: mod_base = OTHER; note = 2'-O-methyl ribonucleotide
  modified_base 89: mod_base = OTHER; note = 2'-O-methyl ribonucleotide
  modified_base 90: mod_base = OTHER; note = 2'-O-methyl ribonucleotide
  modified_base 91: mod_base = OTHER; note = 2'-O-methyl ribonucleotide
  modified_base 92: mod_base = OTHER; note = 2'-O-methyl ribonucleotide
  modified_base 93: mod_base = OTHER; note = 2'-O-methyl ribonucleotide
  modified_base 94: mod_base = OTHER; note = 2'-O-methyl ribonucleotide
  modified_base 95: mod_base = OTHER; note = 2'-O-methyl ribonucleotide
  modified_base 96: mod_base = OTHER; note = 2'-O-methyl ribonucleotide
  modified_base 97: mod_base = OTHER; note = 2'-O-methyl ribonucleotide
  modified_base 98: mod_base = OTHER; note = 2'-O-methyl ribonucleotide
  modified_base 99: mod_base = OTHER; note = 2'-O-methyl ribonucleotide
  modified_base 100: mod_base = OTHER; note = 2'-O-methyl ribonucleotide
  modified_base 101: mod_base = OTHER; note = uniform ribonucleotides (A, C, G, inosine or U), deoxynucleotides (A, G, C, inosine or T), ribonebularine, 2'-O-methylnebularine or deoxynebularine
  modified_base 102: mod_base = OTHER; note = uniform ribonucleotides (A, C, G, inosine or U), deoxynucleotides (A, G, C, inosine or T), ribonebularine, 2'-O-methylnebularine or deoxynebularine
  modified_base 103: mod_base = OTHER; note = uniform ribonucleotides (A, C, G, inosine or U), deoxynucleotides (A, G, C, inosine or T), ribonebularine, 2'-O-methylnebularine or deoxynebularine
  modified_base 1..4: mod_base = OTHER; note = phosphorothioate linkage
  modified_base 25..26: mod_base = OTHER; note = phosphorothioate linkage
  modified_base 45..46: mod_base = OTHER; note = phosphorothioate linkage
  modified_base 64..65: mod_base = OTHER; note = phosphorothioate linkage
  modified_base 97..100: mod_base = OTHER; note = phosphorothioate linkage
  misc_feature 1..100: note = RNA
  misc_feature 101..103: note = Optionally DNA or RNA

SEQ ID NO: 2879 - DNA, 103 bp, synthetic construct; identical to SEQ ID NO: 1796
  source 1..103: mol_type = other DNA
  modified_base 1: mod_base = OTHER; note = 2'-O-methyl ribonucleotide
  modified_base 2: mod_base = OTHER; note = 2'-O-methyl ribonucleotide
  modified_base 3: mod_base = OTHER; note = 2'-O-methyl ribonucleotide
  modified_base 21: mod_base = OTHER; note = 2'-O-methyl ribonucleotide
  modified_base 28: mod_base = OTHER; note = 2'-O-methyl ribonucleotide
  modified_base 29: mod_base = OTHER; note = 2'-O-methyl ribonucleotide
  modified_base 30: mod_base = OTHER; note = 2'-O-methyl ribonucleotide
  modified_base 31: mod_base = OTHER; note = 2'-O-methyl ribonucleotide
  modified_base 32: mod_base = OTHER; note = 2'-O-methyl ribonucleotide
  modified_base 34: mod_base = OTHER; note = 2'-O-methyl ribonucleotide
  modified_base 35: mod_base = OTHER; note = 2'-O-methyl ribonucleotide
  modified_base 36: mod_base = OTHER; note = 2'-O-methyl ribonucleotide
  modified_base 37: mod_base = OTHER; note = 2'-O-methyl ribonucleotide
  modified_base 38: mod_base = OTHER; note = 2'-O-methyl ribonucleotide
  modified_base 39: mod_base = OTHER; note = 2'-O-methyl ribonucleotide
  modified_base 40: mod_base = OTHER; note = 2'-O-methyl ribonucleotide
  modified_base 41: mod_base = OTHER; note = 2'-O-methyl ribonucleotide
  modified_base 42: mod_base = OTHER; note = 2'-O-methyl ribonucleotide
  modified_base 46: mod_base = OTHER; note = 2'-O-methyl ribonucleotide
  modified_base 48: mod_base = OTHER; note = 2'-O-methyl ribonucleotide
  modified_base 50: mod_base = OTHER; note = 2'-O-methyl ribonucleotide
  modified_base 52: mod_base = OTHER; note = 2'-O-methyl ribonucleotide
  modified_base 53: mod_base = OTHER; note = 2'-O-methyl ribonucleotide
  modified_base 54: mod_base = OTHER; note = 2'-O-methyl ribonucleotide
  modified_base 55: mod_base = OTHER; note = 2'-O-methyl ribonucleotide
  modified_base 56: mod_base = OTHER; note = 2'-O-methyl ribonucleotide
  modified_base 57: mod_base = OTHER; note = 2'-O-methyl ribonucleotide
  modified_base 60: mod_base = OTHER; note = 2'-O-methyl ribonucleotide
  modified_base 61: mod_base = OTHER; note = 2'-O-methyl ribonucleotide
  modified_base 66: mod_base = OTHER; note = 2'-O-methyl ribonucleotide
  modified_base 67: mod_base = OTHER; note = 2'-O-methyl ribonucleotide
  modified_base 70: mod_base = OTHER; note = 2'-O-methyl ribonucleotide
  modified_base 71: mod_base = OTHER; note = 2'-O-methyl ribonucleotide
  modified_base 72: mod_base = OTHER; note = 2'-O-methyl ribonucleotide
  modified_base 74: mod_base = OTHER; note = 2'-O-methyl ribonucleotide
  modified_base 75: mod_base = OTHER; note = 2'-O-methyl ribonucleotide
  modified_base 76: mod_base = OTHER; note = 2'-O-methyl ribonucleotide
  modified_base 77: mod_base = OTHER; note = 2'-O-methyl ribonucleotide
  modified_base 78: mod_base = OTHER; note = 2'-O-methyl ribonucleotide
  modified_base 79: mod_base = OTHER; note = 2'-O-methyl ribonucleotide
  modified_base 80: mod_base = OTHER; note = 2'-O-methyl ribonucleotide
  modified_base 81: mod_base = OTHER; note = 2'-O-methyl ribonucleotide
  modified_base 83: mod_base = OTHER; note = 2'-O-methyl ribonucleotide
  modified_base 84: mod_base = OTHER; note = 2'-O-methyl ribonucleotide
  modified_base 85: mod_base = OTHER; note = 2'-O-methyl ribonucleotide
  modified_base 86: mod_base = OTHER; note = 2'-O-methyl ribonucleotide
  modified_base 87: mod_base = OTHER; note = 2'-O-methyl ribonucleotide
  modified_base 88: mod_base = OTHER; note = 2'-O-methyl ribonucleotide
  modified_base 89: mod_base = OTHER; note = 2'-O-methyl ribonucleotide
  modified_base 90: mod_base = OTHER; note = 2'-O-methyl ribonucleotide
  modified_base 91: mod_base = OTHER; note = 2'-O-methyl ribonucleotide
  modified_base 92: mod_base = OTHER; note = 2'-O-methyl ribonucleotide
  modified_base 93: mod_base = OTHER; note = 2'-O-methyl ribonucleotide
  modified_base 94: mod_base = OTHER; note = 2'-O-methyl ribonucleotide
  modified_base 95: mod_base = OTHER; note = 2'-O-methyl ribonucleotide
  modified_base 96: mod_base = OTHER; note = 2'-O-methyl ribonucleotide
  modified_base 97: mod_base = OTHER; note = 2'-O-methyl ribonucleotide
  modified_base 98: mod_base = OTHER; note = 2'-O-methyl ribonucleotide
  modified_base 99: mod_base = OTHER; note = 2'-O-methyl ribonucleotide
  modified_base 100: mod_base = OTHER; note = 2'-O-methyl ribonucleotide
  modified_base 101: mod_base = OTHER; note = uniform ribonucleotides (A, C, G, inosine or U), deoxynucleotides (A, G, C, inosine or T), ribonebularine, 2'-O-methylnebularine or deoxynebularine
  modified_base 102: mod_base = OTHER; note = uniform ribonucleotides (A, C, G, inosine or U), deoxynucleotides (A, G, C, inosine or T), ribonebularine, 2'-O-methylnebularine or deoxynebularine
  modified_base 103: mod_base = OTHER; note = uniform ribonucleotides (A, C, G, inosine or U), deoxynucleotides (A, G, C, inosine or T), ribonebularine, 2'-O-methylnebularine or deoxynebularine
  modified_base 1..4: mod_base = OTHER; note = phosphorothioate linkage
  modified_base 25..26: mod_base = OTHER; note = phosphorothioate linkage
  modified_base 45..46: mod_base = OTHER; note = phosphorothioate linkage
  modified_base 64..65: mod_base = OTHER; note = phosphorothioate linkage
  modified_base 97..100: mod_base = OTHER; note = phosphorothioate linkage
  misc_feature 1..100: note = RNA
  misc_feature 101..103: note = Optionally DNA or RNA

SEQ ID NO: 2880 - DNA, 103 bp, synthetic construct; identical to SEQ ID NO: 1797
  source 1..103: mol_type = other DNA
  modified_base 1: mod_base = OTHER; note = 2'-O-methyl ribonucleotide
  modified_base 2: mod_base = OTHER; note = 2'-O-methyl ribonucleotide
  modified_base 3: mod_base = OTHER; note = 2'-O-methyl ribonucleotide
  modified_base 21: mod_base = OTHER; note = 2'-O-methyl ribonucleotide
  modified_base 28: mod_base = OTHER; note = 2'-O-methyl ribonucleotide
  modified_base 29: mod_base = OTHER; note = 2'-O-methyl ribonucleotide
  modified_base 30: mod_base = OTHER; note = 2'-O-methyl ribonucleotide
  modified_base 31: mod_base = OTHER; note = 2'-O-methyl ribonucleotide
  modified_base 32: mod_base = OTHER; note = 2'-O-methyl ribonucleotide
  modified_base 33: mod_base = OTHER; note = 2'-O-methyl ribonucleotide
  modified_base 34: mod_base = OTHER; note = 2'-O-methyl ribonucleotide
  modified_base 35: mod_base = OTHER; note = 2'-O-methyl ribonucleotide
  modified_base 36: mod_base = OTHER; note = 2'-O-methyl ribonucleotide
  modified_base 37: mod_base = OTHER; note = 2'-O-methyl ribonucleotide
  modified_base 38: mod_base = OTHER; note = 2'-O-methyl ribonucleotide
  modified_base 39: mod_base = OTHER; note = 2'-O-methyl ribonucleotide
  modified_base 40: mod_base = OTHER; note = 2'-O-methyl ribonucleotide
  modified_base 41: mod_base = OTHER; note = 2'-O-methyl ribonucleotide
  modified_base 42: mod_base = OTHER; note = 2'-O-methyl ribonucleotide
  modified_base 46: mod_base = OTHER; note = 2'-O-methyl ribonucleotide
  modified_base 48: mod_base = OTHER; note = 2'-O-methyl ribonucleotide
  modified_base 50: mod_base = OTHER; note = 2'-O-methyl ribonucleotide
  modified_base 52: mod_base = OTHER; note = 2'-O-methyl ribonucleotide
  modified_base 53: mod_base = OTHER; note = 2'-O-methyl ribonucleotide
  modified_base 54: mod_base = OTHER; note = 2'-O-methyl ribonucleotide
  modified_base 57: mod_base = OTHER; note = 2'-O-methyl ribonucleotide
  modified_base 61: mod_base = OTHER; note = 2'-O-methyl ribonucleotide
  modified_base 66: mod_base = OTHER; note = 2'-O-methyl ribonucleotide
  modified_base 67: mod_base = OTHER; note = 2'-O-methyl ribonucleotide
  modified_base 70: mod_base = OTHER; note = 2'-O-methyl ribonucleotide
  modified_base 71: mod_base = OTHER; note = 2'-O-methyl ribonucleotide
  modified_base 72: mod_base = OTHER; note = 2'-O-methyl ribonucleotide
  modified_base 74: mod_base = OTHER; note = 2'-O-methyl ribonucleotide
  modified_base 75: mod_base = OTHER; note = 2'-O-methyl ribonucleotide
  modified_base 76: mod_base = OTHER; note = 2'-O-methyl ribonucleotide
  modified_base 77: mod_base = OTHER; note = 2'-O-methyl ribonucleotide
  modified_base 78: mod_base = OTHER; note = 2'-O-methyl ribonucleotide
  modified_base 79: mod_base = OTHER; note = 2'-O-methyl ribonucleotide
  modified_base 80: mod_base = OTHER; note = 2'-O-methyl ribonucleotide
  modified_base 82: mod_base = OTHER; note = 2'-O-methyl ribonucleotide
  modified_base 83: mod_base = OTHER; note = 2'-O-methyl ribonucleotide
  modified_base 84: mod_base = OTHER; note = 2'-O-methyl ribonucleotide
  modified_base 85: mod_base = OTHER; note = 2'-O-methyl ribonucleotide
  modified_base 86: mod_base = OTHER; note = 2'-O-methyl ribonucleotide
  modified_base 87: mod_base = OTHER; note = 2'-O-methyl ribonucleotide
  modified_base 89: mod_base = OTHER; note = 2'-O-methyl ribonucleotide
  modified_base 92: mod_base = OTHER; note = 2'-O-methyl ribonucleotide
  modified_base 93: mod_base = OTHER; note = 2'-O-methyl ribonucleotide
  modified_base 94: mod_base = OTHER; note = 2'-O-methyl ribonucleotide
  modified_base 95: mod_base = OTHER; note = 2'-O-methyl ribonucleotide
  modified_base 96: mod_base = OTHER; note = 2'-O-methyl ribonucleotide
  modified_base 97: mod_base = OTHER; note = 2'-O-methyl ribonucleotide
  modified_base 98: mod_base = OTHER; note = 2'-O-methyl ribonucleotide
  modified_base 99: mod_base = OTHER; note = 2'-O-methyl ribonucleotide
  modified_base 100: mod_base = OTHER; note = 2'-O-methyl ribonucleotide
  modified_base 101: mod_base = OTHER; note = uniform ribonucleotides (A, C, G, inosine or U), deoxynucleotides (A, G, C, inosine or T), ribonebularine, 2'-O-methylnebularine or deoxynebularine
  modified_base 102: mod_base = OTHER; note = uniform ribonucleotides (A, C, G, inosine or U), deoxynucleotides (A, G, C, inosine or T), ribonebularine, 2'-O-methylnebularine or deoxynebularine
  modified_base 103: mod_base = OTHER; note = uniform ribonucleotides (A, C, G, inosine or U), deoxynucleotides (A, G, C, inosine or T), ribonebularine, 2'-O-methylnebularine or deoxynebularine
  modified_base 1..4: mod_base = OTHER; note = phosphorothioate linkage
  modified_base 25..26: mod_base = OTHER; note = phosphorothioate linkage
  modified_base 45..46: mod_base = OTHER; note = phosphorothioate linkage
  modified_base 64..65: mod_base = OTHER; note = phosphorothioate linkage
  modified_base 97..100: mod_base = OTHER; note = phosphorothioate linkage
  misc_feature 1..100: note = RNA
  misc_feature 101..103: note = Optionally DNA or RNA

SEQ ID NO: 2881 - DNA, 103 bp, synthetic construct; identical to SEQ ID NO: 1797
  source 1..103: mol_type = other DNA
  modified_base 1: mod_base = OTHER; note = 2'-O-methyl ribonucleotide
  modified_base 2: mod_base = OTHER; note = 2'-O-methyl ribonucleotide
  modified_base 3: mod_base = OTHER; note = 2'-O-methyl ribonucleotide
  modified_base 21: mod_base = OTHER; note = 2'-O-methyl ribonucleotide
  modified_base 28: mod_base = OTHER; note = 2'-O-methyl ribonucleotide
  modified_base 29: mod_base = OTHER; note = 2'-O-methyl ribonucleotide
  modified_base 30: mod_base = OTHER; note = 2'-O-methyl ribonucleotide
  modified_base 31: mod_base = OTHER; note = 2'-O-methyl ribonucleotide
  modified_base 32: mod_base = OTHER; note = 2'-O-methyl ribonucleotide
  modified_base 33: mod_base = OTHER; note = 2'-O-methyl ribonucleotide
  modified_base 34: mod_base = OTHER; note = 2'-O-methyl ribonucleotide
  modified_base 35: mod_base = OTHER; note = 2'-O-methyl ribonucleotide
  modified_base 36: mod_base = OTHER; note = 2'-O-methyl ribonucleotide
  modified_base 37: mod_base = OTHER; note = 2'-O-methyl ribonucleotide
  modified_base 38: mod_base = OTHER; note = 2'-O-methyl ribonucleotide
  modified_base 39: mod_base = OTHER; note = 2'-O-methyl ribonucleotide
  modified_base 40: mod_base = OTHER; note = 2'-O-methyl ribonucleotide
  modified_base 41: mod_base = OTHER; note = 2'-O-methyl ribonucleotide
  modified_base 42: mod_base = OTHER; note = 2'-O-methyl ribonucleotide
  modified_base 46: mod_base = OTHER; note = 2'-O-methyl ribonucleotide
  modified_base 48: mod_base = OTHER; note = 2'-O-methyl ribonucleotide
  modified_base 50: mod_base = OTHER; note = 2'-O-methyl ribonucleotide
  modified_base 52: mod_base = OTHER; note = 2'-O-methyl ribonucleotide
  modified_base 53: mod_base = OTHER; note = 2'-O-methyl ribonucleotide
  modified_base 54: mod_base = OTHER; note = 2'-O-methyl ribonucleotide
  modified_base 55: mod_base = OTHER; note = 2'-O-methyl ribonucleotide
  modified_base 56: mod_base = OTHER; note = 2'-O-methyl ribonucleotide
  modified_base 57: mod_base = OTHER; note = 2'-O-methyl ribonucleotide
  modified_base 60: mod_base = OTHER; note = 2'-O-methyl ribonucleotide
  modified_base 61: mod_base = OTHER; note = 2'-O-methyl ribonucleotide
  modified_base 66: mod_base = OTHER; note = 2'-O-methyl ribonucleotide
  modified_base 67: mod_base = OTHER; note = 2'-O-methyl ribonucleotide
  modified_base 70: mod_base = OTHER; note = 2'-O-methyl ribonucleotide
  modified_base 71: mod_base = OTHER; note = 2'-O-methyl ribonucleotide
  modified_base 72: mod_base = OTHER; note = 2'-O-methyl ribonucleotide
  modified_base 74: mod_base = OTHER; note = 2'-O-methyl ribonucleotide
  modified_base 75: mod_base = OTHER; note = 2'-O-methyl ribonucleotide
  modified_base 76: mod_base = OTHER; note = 2'-O-methyl ribonucleotide
  modified_base 77: mod_base = OTHER; note = 2'-O-methyl ribonucleotide
  modified_base 78: mod_base = OTHER; note = 2'-O-methyl ribonucleotide
  modified_base 79: mod_base = OTHER; note = 2'-O-methyl ribonucleotide
  modified_base 80: mod_base = OTHER; note = 2'-O-methyl ribonucleotide
  modified_base 82: mod_base = OTHER; note = 2'-O-methyl ribonucleotide
  modified_base 83: mod_base = OTHER; note = 2'-O-methyl ribonucleotide
  modified_base 84: mod_base = OTHER; note = 2'-O-methyl ribonucleotide
  modified_base 85: mod_base = OTHER; note = 2'-O-methyl ribonucleotide
  modified_base 86: mod_base = OTHER; note = 2'-O-methyl ribonucleotide
  modified_base 87: mod_base = OTHER; note = 2'-O-methyl ribonucleotide
  modified_base 89: mod_base = OTHER; note = 2'-O-methyl ribonucleotide
  modified_base 92: mod_base = OTHER; note = 2'-O-methyl ribonucleotide
  modified_base 93: mod_base = OTHER; note = 2'-O-methyl ribonucleotide
  modified_base 94: mod_base = OTHER; note = 2'-O-methyl ribonucleotide
  modified_base 95: mod_base = OTHER; note = 2'-O-methyl ribonucleotide
  modified_base 96: mod_base = OTHER; note = 2'-O-methyl ribonucleotide
  modified_base 97: mod_base = OTHER; note = 2'-O-methyl ribonucleotide
  modified_base 98: mod_base = OTHER; note = 2'-O-methyl ribonucleotide
  modified_base 99: mod_base = OTHER; note = 2'-O-methyl ribonucleotide
  modified_base 100: mod_base = OTHER; note = 2'-O-methyl ribonucleotide
  modified_base 101: mod_base = OTHER; note = uniform ribonucleotides (A, C, G, inosine or U), deoxynucleotides (A, G, C, inosine or T), ribonebularine, 2'-O-methylnebularine or deoxynebularine
  modified_base 102: mod_base = OTHER; note = uniform ribonucleotides (A, C, G, inosine or U), deoxynucleotides (A, G, C, inosine or T), ribonebularine, 2'-O-methylnebularine or deoxynebularine
  modified_base 103: mod_base = OTHER; note = uniform ribonucleotides (A, C, G, inosine or U), deoxynucleotides (A, G, C, inosine or T), ribonebularine, 2'-O-methylnebularine or deoxynebularine
  modified_base 1..4: mod_base = OTHER; note = phosphorothioate linkage
  modified_base 25..26: mod_base = OTHER; note = phosphorothioate linkage
  modified_base 45..46: mod_base = OTHER; note = phosphorothioate linkage
  modified_base 64..65: mod_base = OTHER; note = phosphorothioate linkage
  modified_base 97..100: mod_base = OTHER; note = phosphorothioate linkage
  misc_feature 1..100: note = RNA
  misc_feature 101..103: note = Optionally DNA or RNA

SEQ ID NO: 2882 - DNA, 103 bp, synthetic construct; identical to SEQ ID NO: 1797
  source 1..103: mol_type = other DNA
  modified_base 1: mod_base = OTHER; note = 2'-O-methyl ribonucleotide
  modified_base 2: mod_base = OTHER; note = 2'-O-methyl ribonucleotide
  modified_base 3: mod_base = OTHER; note = 2'-O-methyl ribonucleotide
  modified_base 21: mod_base = OTHER; note = 2'-O-methyl ribonucleotide
  modified_base 28: mod_base = OTHER; note = 2'-O-methyl ribonucleotide
  modified_base 29: mod_base = OTHER; note = 2'-O-methyl ribonucleotide
  modified_base 30: mod_base = OTHER; note = 2'-O-methyl ribonucleotide
  modified_base 31: mod_base = OTHER; note = 2'-O-methyl ribonucleotide
  modified_base 32: mod_base = OTHER; note = 2'-O-methyl ribonucleotide
  modified_base 33: mod_base = OTHER; note = 2'-O-methyl ribonucleotide
  modified_base 34: mod_base = OTHER; note = 2'-O-methyl ribonucleotide
  modified_base 35: mod_base = OTHER; note = 2'-O-methyl ribonucleotide
  modified_base 36: mod_base = OTHER; note = 2'-O-methyl ribonucleotide
  modified_base 37: mod_base = OTHER; note = 2'-O-methyl ribonucleotide
  modified_base 38: mod_base = OTHER; note = 2'-O-methyl ribonucleotide
  modified_base 39: mod_base = OTHER; note = 2'-O-methyl ribonucleotide
  modified_base 40: mod_base = OTHER; note = 2'-O-methyl ribonucleotide
  modified_base 41: mod_base = OTHER; note = 2'-O-methyl ribonucleotide
  modified_base 42: mod_base = OTHER; note = 2'-O-methyl ribonucleotide
  modified_base 46: mod_base = OTHER; note = 2'-O-methyl ribonucleotide
  modified_base 48: mod_base = OTHER; note = 2'-O-methyl ribonucleotide
  modified_base 50: mod_base = OTHER; note = 2'-O-methyl ribonucleotide
  modified_base 52: mod_base = OTHER; note = 2'-O-methyl ribonucleotide
  modified_base 53: mod_base = OTHER; note = 2'-O-methyl ribonucleotide
  modified_base 54: mod_base = OTHER; note = 2'-O-methyl ribonucleotide
  modified_base 57: mod_base = OTHER; note = 2'-O-methyl ribonucleotide
  modified_base 61: mod_base = OTHER; note = 2'-O-methyl ribonucleotide
  modified_base 66: mod_base = OTHER; note = 2'-O-methyl ribonucleotide
  modified_base 67: mod_base = OTHER; note = 2'-O-methyl ribonucleotide
  modified_base 70: mod_base = OTHER; note = 2'-O-methyl ribonucleotide
  modified_base 71: mod_base = OTHER; note = 2'-O-methyl ribonucleotide
  modified_base 72: mod_base = OTHER; note = 2'-O-methyl ribonucleotide
  modified_base 73: mod_base = OTHER; note = 2'-O-methyl ribonucleotide
  modified_base 74: mod_base = OTHER; note = 2'-O-methyl ribonucleotide
  modified_base 75: mod_base = OTHER; note = 2'-O-methyl ribonucleotide
  modified_base 76: mod_base = OTHER; note = 2'-O-methyl ribonucleotide
  modified_base 77: mod_base = OTHER; note = 2'-O-methyl ribonucleotide
  modified_base 78: mod_base = OTHER; note = 2'-O-methyl ribonucleotide
  modified_base 79: mod_base = OTHER; note = 2'-O-methyl ribonucleotide
  modified_base 80: mod_base = OTHER; note = 2'-O-methyl ribonucleotide
  modified_base 82: mod_base = OTHER; note = 2'-O-methyl ribonucleotide
  modified_base 83: mod_base = OTHER; note = 2'-O-methyl ribonucleotide
  modified_base 84: mod_base = OTHER; note = 2'-O-methyl ribonucleotide
  modified_base 85: mod_base = OTHER; note = 2'-O-methyl ribonucleotide
  modified_base 86: mod_base = OTHER; note = 2'-O-methyl ribonucleotide
  modified_base 87: mod_base = OTHER; note = 2'-O-methyl ribonucleotide
  modified_base 89: mod_base = OTHER; note = 2'-O-methyl ribonucleotide
  modified_base 92: mod_base = OTHER; note = 2'-O-methyl ribonucleotide
  modified_base 93: mod_base = OTHER; note = 2'-O-methyl ribonucleotide
  modified_base 94: mod_base = OTHER; note = 2'-O-methyl ribonucleotide
  modified_base 95: mod_base = OTHER; note = 2'-O-methyl ribonucleotide
  modified_base 96: mod_base = OTHER; note = 2'-O-methyl ribonucleotide
  modified_base 97: mod_base = OTHER; note = 2'-O-methyl ribonucleotide
  modified_base 98: mod_base = OTHER; note = 2'-O-methyl ribonucleotide
  modified_base 99: mod_base = OTHER; note = 2'-O-methyl ribonucleotide
  modified_base 100: mod_base = OTHER; note = 2'-O-methyl ribonucleotide
  modified_base 101: mod_base = OTHER; note = uniform ribonucleotides (A, C, G, inosine or U), deoxynucleotides (A, G, C, inosine or T), ribonebularine, 2'-O-methylnebularine or deoxynebularine
  modified_base 102: mod_base = OTHER; note = uniform ribonucleotides (A, C, G, inosine or U), deoxynucleotides (A, G, C, inosine or T), ribonebularine, 2'-O-methylnebularine or deoxynebularine
  modified_base 103: mod_base = OTHER; note = uniform ribonucleotides (A, C, G, inosine or U), deoxynucleotides (A, G, C, inosine or T), ribonebularine, 2'-O-methylnebularine or deoxynebularine
  modified_base 1..4: mod_base = OTHER; note = phosphorothioate linkage
  modified_base 25..26: mod_base = OTHER; note = phosphorothioate linkage
  modified_base 45..46: mod_base = OTHER; note = phosphorothioate linkage
  modified_base 64..65: mod_base = OTHER; note = phosphorothioate linkage
  modified_base 97..100: mod_base = OTHER; note = phosphorothioate linkage
  misc_feature 1..100: note = RNA
  misc_feature 101..103: note = Optionally DNA or RNA

SEQ ID NO: 2883 - DNA, 103 bp, synthetic construct; identical to SEQ ID NO: 1797
  source 1..103: mol_type = other DNA
  modified_base 1: mod_base = OTHER; note = 2'-O-methyl ribonucleotide
  modified_base 2: mod_base = OTHER; note = 2'-O-methyl ribonucleotide
  modified_base 3: mod_base = OTHER; note = 2'-O-methyl ribonucleotide
  modified_base 21: mod_base = OTHER; note = 2'-O-methyl ribonucleotide
  modified_base 28: mod_base = OTHER; note = 2'-O-methyl ribonucleotide
  modified_base 29: mod_base = OTHER; note = 2'-O-methyl ribonucleotide
  modified_base 30: mod_base = OTHER; note = 2'-O-methyl ribonucleotide
  modified_base 31: mod_base = OTHER; note = 2'-O-methyl ribonucleotide
  modified_base 32: mod_base = OTHER; note = 2'-O-methyl ribonucleotide
  modified_base 33: mod_base = OTHER; note = 2'-O-methyl ribonucleotide
  modified_base 34: mod_base = OTHER; note = 2'-O-methyl ribonucleotide
  modified_base 35: mod_base = OTHER; note = 2'-O-methyl ribonucleotide
  modified_base 36: mod_base = OTHER; note = 2'-O-methyl ribonucleotide
  modified_base 37: mod_base = OTHER; note = 2'-O-methyl ribonucleotide
  modified_base 38: mod_base = OTHER; note = 2'-O-methyl ribonucleotide
  modified_base 39: mod_base = OTHER; note = 2'-O-methyl ribonucleotide
  modified_base 40: mod_base = OTHER; note = 2'-O-methyl ribonucleotide
  modified_base 41: mod_base = OTHER; note = 2'-O-methyl ribonucleotide
  modified_base 42: mod_base = OTHER; note = 2'-O-methyl ribonucleotide
  modified_base 46: mod_base = OTHER; note = 2'-O-methyl ribonucleotide
  modified_base 48: mod_base = OTHER; note = 2'-O-methyl ribonucleotide
  modified_base 50: mod_base = OTHER; note = 2'-O-methyl ribonucleotide
  modified_base 52: mod_base = OTHER; note = 2'-O-methyl ribonucleotide
  modified_base 53: mod_base = OTHER; note = 2'-O-methyl ribonucleotide
  modified_base 54: mod_base = OTHER; note = 2'-O-methyl ribonucleotide
  modified_base 57: mod_base = OTHER; note = 2'-O-methyl ribonucleotide
  modified_base 61: mod_base = OTHER; note = 2'-O-methyl ribonucleotide
  modified_base 66: mod_base = OTHER; note = 2'-O-methyl ribonucleotide
  modified_base 67: mod_base = OTHER; note = 2'-O-methyl ribonucleotide
  modified_base 70: mod_base = OTHER; note = 2'-O-methyl ribonucleotide
  modified_base 71: mod_base = OTHER; note = 2'-O-methyl ribonucleotide
  modified_base 72: mod_base = OTHER; note = 2'-O-methyl ribonucleotide
  modified_base 73: mod_base = OTHER; note = 2'-O-methyl ribonucleotide
  modified_base 74: mod_base = OTHER; note = 2'-O-methyl ribonucleotide
  modified_base 75: mod_base = OTHER; note = 2'-O-methyl ribonucleotide
  modified_base 76: mod_base = OTHER; note = 2'-O-methyl ribonucleotide
  modified_base 77: mod_base = OTHER; note = 2'-O-methyl ribonucleotide
  modified_base 78: mod_base = OTHER; note = 2'-O-methyl ribonucleotide
  modified_base 79: mod_base = OTHER; note = 2'-O-methyl ribonucleotide
  modified_base 80: mod_base = OTHER; note = 2'-O-methyl ribonucleotide
  modified_base 82: mod_base = OTHER; note = 2'-O-methyl ribonucleotide
  modified_base 83: mod_base = OTHER; note = 2'-O-methyl ribonucleotide
  modified_base 84: mod_base = OTHER; note = 2'-O-methyl ribonucleotide
  modified_base 85: mod_base = OTHER; note = 2'-O-methyl ribonucleotide
  modified_base 86: mod_base = OTHER; note = 2'-O-methyl ribonucleotide
  modified_base 87: mod_base = OTHER; note = 2'-O-methyl ribonucleotide
  modified_base 89: mod_base = OTHER; note = 2'-O-methyl ribonucleotide
  modified_base 91: mod_base = OTHER; note = 2'-O-methyl ribonucleotide
  modified_base 92: mod_base = OTHER; note = 2'-O-methyl ribonucleotide
  modified_base 93: mod_base = OTHER; note = 2'-O-methyl ribonucleotide
  modified_base 94: mod_base = OTHER; note = 2'-O-methyl ribonucleotide
  modified_base 95: mod_base = OTHER; note = 2'-O-methyl ribonucleotide
  modified_base 96: mod_base = OTHER; note = 2'-O-methyl ribonucleotide
  modified_base 97: mod_base = OTHER; note = 2'-O-methyl ribonucleotide
  modified_base 98: mod_base = OTHER; note = 2'-O-methyl ribonucleotide
  modified_base 99: mod_base = OTHER; note = 2'-O-methyl ribonucleotide
  modified_base 100: mod_base = OTHER; note = 2'-O-methyl ribonucleotide
  modified_base 101: mod_base = OTHER; note = uniform ribonucleotides (A, C, G, inosine or U), deoxynucleotides (A, G, C, inosine or T), ribonebularine, 2'-O-methylnebularine or deoxynebularine
  modified_base 102: mod_base = OTHER; note = uniform ribonucleotides (A, C, G, inosine or U), deoxynucleotides (A, G, C, inosine or T), ribonebularine, 2'-O-methylnebularine or deoxynebularine
  modified_base 103: mod_base = OTHER; note = uniform ribonucleotides (A, C, G, inosine or U), deoxynucleotides (A, G, C, inosine or T), ribonebularine, 2'-O-methylnebularine or deoxynebularine
  modified_base 1..4: mod_base = OTHER; note = phosphorothioate linkage
  modified_base 25..26: mod_base = OTHER; note = phosphorothioate linkage
  modified_base 45..46: mod_base = OTHER; note = phosphorothioate linkage
  modified_base 64..65: mod_base = OTHER; note = phosphorothioate linkage
  modified_base 97..100: mod_base = OTHER; note = phosphorothioate linkage
  misc_feature 1..100: note = RNA
  misc_feature 101..103: note = Optionally DNA or RNA

SEQ ID NO: 2884 - DNA, 103 bp, synthetic construct; identical to SEQ ID NO: 1797
  source 1..103: mol_type = other DNA
  modified_base 1: mod_base = OTHER; note = 2'-O-methyl ribonucleotide
  modified_base 2: mod_base = OTHER; note = 2'-O-methyl ribonucleotide
  modified_base 3: mod_base = OTHER; note = 2'-O-methyl ribonucleotide
  modified_base 21: mod_base = OTHER; note = 2'-O-methyl ribonucleotide
  modified_base 28: mod_base = OTHER; note = 2'-O-methyl ribonucleotide
  modified_base 29: mod_base = OTHER; note = 2'-O-methyl ribonucleotide
  modified_base 30: mod_base = OTHER; note = 2'-O-methyl ribonucleotide
  modified_base 31: mod_base = OTHER; note = 2'-O-methyl ribonucleotide
  modified_base 32: mod_base = OTHER; note = 2'-O-methyl ribonucleotide
  modified_base 34: mod_base = OTHER; note = 2'-O-methyl ribonucleotide
  modified_base 35: mod_base = OTHER; note = 2'-O-methyl ribonucleotide
  modified_base 36: mod_base = OTHER; note = 2'-O-methyl ribonucleotide
  modified_base 37: mod_base = OTHER; note = 2'-O-methyl ribonucleotide
  modified_base 38: mod_base = OTHER; note = 2'-O-methyl ribonucleotide
  modified_base 39: mod_base = OTHER; note = 2'-O-methyl ribonucleotide
  modified_base 40: mod_base = OTHER; note = 2'-O-methyl ribonucleotide
  modified_base 41: mod_base = OTHER; note = 2'-O-methyl ribonucleotide
  modified_base 42: mod_base = OTHER; note = 2'-O-methyl ribonucleotide
  modified_base 46: mod_base = OTHER; note = 2'-O-methyl ribonucleotide
  modified_base 48: mod_base = OTHER; note = 2'-O-methyl ribonucleotide
  modified_base 50: mod_base = OTHER; note = 2'-O-methyl ribonucleotide
  modified_base 52: mod_base = OTHER; note = 2'-O-methyl ribonucleotide
  modified_base 53: mod_base = OTHER; note = 2'-O-methyl ribonucleotide
  modified_base 54: mod_base = OTHER; note = 2'-O-methyl ribonucleotide
  modified_base 57: mod_base = OTHER; note = 2'-O-methyl ribonucleotide
  modified_base 61: mod_base = OTHER; note = 2'-O-methyl ribonucleotide
  modified_base 66: mod_base = OTHER; note = 2'-O-methyl ribonucleotide
  modified_base 67: mod_base = OTHER; note = 2'-O-methyl ribonucleotide
  modified_base 70: mod_base = OTHER; note = 2'-O-methyl ribonucleotide
  modified_base 71: mod_base = OTHER; note = 2'-O-methyl ribonucleotide
  modified_base 72: mod_base = OTHER; note = 2'-O-methyl ribonucleotide
  modified_base 73: mod_base = OTHER; note = 2'-O-methyl ribonucleotide
  modified_base 74: mod_base = OTHER; note = 2'-O-methyl ribonucleotide
  modified_base 75: mod_base = OTHER; note = 2'-O-methyl ribonucleotide
  modified_base 76: mod_base = OTHER; note = 2'-O-methyl ribonucleotide
  modified_base 77: mod_base = OTHER; note = 2'-O-methyl ribonucleotide
  modified_base 78: mod_base = OTHER; note = 2'-O-methyl ribonucleotide
  modified_base 79: mod_base = OTHER; note = 2'-O-methyl ribonucleotide
  modified_base 80: mod_base = OTHER; note = 2'-O-methyl ribonucleotide
  modified_base 82: mod_base = OTHER; note = 2'-O-methyl ribonucleotide
  modified_base 83: mod_base = OTHER; note = 2'-O-methyl ribonucleotide
  modified_base 84: mod_base = OTHER; note = 2'-O-methyl ribonucleotide
  modified_base 85: mod_base = OTHER; note = 2'-O-methyl ribonucleotide
  modified_base 86: mod_base = OTHER; note = 2'-O-methyl ribonucleotide
  modified_base 87: mod_base = OTHER; note = 2'-O-methyl ribonucleotide
  modified_base 89: mod_base = OTHER; note = 2'-O-methyl ribonucleotide
  modified_base 92: mod_base = OTHER; note = 2'-O-methyl ribonucleotide
  modified_base 93: mod_base = OTHER; note = 2'-O-methyl ribonucleotide
  modified_base 94: mod_base = OTHER; note = 2'-O-methyl ribonucleotide
  modified_base 95: mod_base = OTHER; note = 2'-O-methyl ribonucleotide
  modified_base 96: mod_base = OTHER; note = 2'-O-methyl ribonucleotide
  modified_base 97: mod_base = OTHER; note = 2'-O-methyl ribonucleotide
  modified_base 98: mod_base = OTHER; note = 2'-O-methyl ribonucleotide
  modified_base 99: mod_base = OTHER; note = 2'-O-methyl ribonucleotide
  modified_base 100: mod_base = OTHER; note = 2'-O-methyl ribonucleotide
  modified_base 101: mod_base = OTHER; note = uniform ribonucleotides (A, C, G, inosine or U), deoxynucleotides (A, G, C, inosine or T), ribonebularine, 2'-O-methylnebularine or deoxynebularine
  modified_base 102: mod_base = OTHER; note = uniform ribonucleotides (A, C, G, inosine or U), deoxynucleotides (A, G, C, inosine or T), ribonebularine, 2'-O-methylnebularine or deoxynebularine
  modified_base 103: mod_base = OTHER; note = uniform ribonucleotides (A, C, G, inosine or U), deoxynucleotides (A, G, C, inosine or T), ribonebularine, 2'-O-methylnebularine or deoxynebularine
  modified_base 1..4: mod_base = OTHER; note = phosphorothioate linkage
  modified_base 25..26: mod_base = OTHER; note = phosphorothioate linkage
  modified_base 45..46: mod_base = OTHER; note = phosphorothioate linkage
  modified_base 64..65: mod_base = OTHER; note = phosphorothioate linkage
  modified_base 97..100: mod_base = OTHER; note = phosphorothioate linkage
  misc_feature 1..100: note = RNA
  misc_feature 101..103: note = Optionally DNA or RNA

SEQ ID NO: 2885 - DNA, 103 bp, synthetic construct; identical to SEQ ID NO: 1797
  source 1..103: mol_type = other DNA
  modified_base 1: mod_base = OTHER; note = 2'-O-methyl ribonucleotide
  modified_base 2: mod_base = OTHER; note = 2'-O-methyl ribonucleotide
  modified_base 3: mod_base = OTHER; note = 2'-O-methyl ribonucleotide
  modified_base 21: mod_base = OTHER; note = 2'-O-methyl ribonucleotide
  modified_base 28: mod_base = OTHER; note = 2'-O-methyl ribonucleotide
  modified_base 29: mod_base = OTHER; note = 2'-O-methyl ribonucleotide
  modified_base 30: mod_base = OTHER; note = 2'-O-methyl ribonucleotide
  modified_base 31: mod_base = OTHER; note = 2'-O-methyl ribonucleotide
  modified_base 32: mod_base = OTHER; note = 2'-O-methyl ribonucleotide
  modified_base 34: mod_base = OTHER; note = 2'-O-methyl ribonucleotide
  modified_base 35: mod_base = OTHER; note = 2'-O-methyl ribonucleotide
  modified_base 36: mod_base = OTHER; note = 2'-O-methyl ribonucleotide
  modified_base 37: mod_base = OTHER; note = 2'-O-methyl ribonucleotide
  modified_base 38: mod_base = OTHER; note = 2'-O-methyl ribonucleotide
  modified_base 39: mod_base = OTHER; note = 2'-O-methyl ribonucleotide
  modified_base 40: mod_base = OTHER; note = 2'-O-methyl ribonucleotide
  modified_base 41: mod_base = OTHER; note = 2'-O-methyl ribonucleotide
  modified_base 42: mod_base = OTHER; note = 2'-O-methyl ribonucleotide
  modified_base 46: mod_base = OTHER; note = 2'-O-methyl ribonucleotide
  modified_base 48: mod_base = OTHER; note = 2'-O-methyl ribonucleotide
  modified_base 50: mod_base = OTHER; note = 2'-O-methyl ribonucleotide
  modified_base 52: mod_base = OTHER; note = 2'-O-methyl ribonucleotide
  modified_base 53: mod_base = OTHER; note = 2'-O-methyl ribonucleotide
  modified_base 54: mod_base = OTHER; note = 2'-O-methyl ribonucleotide
  modified_base 57: mod_base = OTHER; note = 2'-O-methyl ribonucleotide
  modified_base 61: mod_base = OTHER; note = 2'-O-methyl ribonucleotide
  modified_base 66: mod_base = OTHER; note = 2'-O-methyl ribonucleotide
  modified_base 67: mod_base = OTHER; note = 2'-O-methyl ribonucleotide
  modified_base 70: mod_base = OTHER; note = 2'-O-methyl ribonucleotide
  modified_base 71: mod_base = OTHER; note = 2'-O-methyl ribonucleotide
  modified_base 72: mod_base = OTHER; note = 2'-O-methyl ribonucleotide
  modified_base 73: mod_base = OTHER; note = 2'-O-methyl ribonucleotide
  modified_base 74: mod_base = OTHER; note = 2'-O-methyl ribonucleotide
  modified_base 75: mod_base = OTHER; note = 2'-O-methyl ribonucleotide
  modified_base 76: mod_base = OTHER; note = 2'-O-methyl ribonucleotide
  modified_base 77: mod_base = OTHER; note = 2'-O-methyl ribonucleotide
  modified_base 78: mod_base = OTHER; note = 2'-O-methyl ribonucleotide
  modified_base 79: mod_base = OTHER; note = 2'-O-methyl ribonucleotide
  modified_base 80: mod_base = OTHER; note = 2'-O-methyl ribonucleotide
  modified_base 82: mod_base = OTHER; note = 2'-O-methyl ribonucleotide
  modified_base 83: mod_base = OTHER; note = 2'-O-methyl ribonucleotide
  modified_base 84: mod_base = OTHER; note = 2'-O-methyl ribonucleotide
  modified_base 85: mod_base = OTHER; note = 2'-O-methyl ribonucleotide
  modified_base 86: mod_base = OTHER; note = 2'-O-methyl ribonucleotide
  modified_base 87: mod_base = OTHER; note = 2'-O-methyl ribonucleotide
  modified_base 89: mod_base = OTHER; note = 2'-O-methyl ribonucleotide
  modified_base 91: mod_base = OTHER; note = 2'-O-methyl ribonucleotide
  modified_base 92: mod_base = OTHER; note = 2'-O-methyl ribonucleotide
  modified_base 93: mod_base = OTHER; note = 2'-O-methyl ribonucleotide
  modified_base 94: mod_base = OTHER; note = 2'-O-methyl ribonucleotide
  modified_base 95: mod_base = OTHER; note = 2'-O-methyl ribonucleotide
  modified_base 96: mod_base = OTHER; note = 2'-O-methyl ribonucleotide
  modified_base 97: mod_base = OTHER; note = 2'-O-methyl ribonucleotide
  modified_base 98: mod_base = OTHER; note = 2'-O-methyl ribonucleotide
  modified_base 99: mod_base = OTHER; note = 2'-O-methyl ribonucleotide
  modified_base 100: mod_base = OTHER; note = 2'-O-methyl ribonucleotide
  modified_base 101: mod_base = OTHER; note = uniform ribonucleotides (A, C, G, inosine or U), deoxynucleotides (A, G, C, inosine or T), ribonebularine, 2'-O-methylnebularine or deoxynebularine
  modified_base 102: mod_base = OTHER; note = uniform ribonucleotides (A, C, G, inosine or U), deoxynucleotides (A, G, C, inosine or T), ribonebularine, 2'-O-methylnebularine or deoxynebularine
  modified_base 103: mod_base = OTHER; note = uniform ribonucleotides (A, C, G, inosine or U), deoxynucleotides (A, G, C, inosine or T), ribonebularine, 2'-O-methylnebularine or deoxynebularine
  modified_base 1..4: mod_base = OTHER; note = phosphorothioate linkage
  modified_base 25..26: mod_base = OTHER; note = phosphorothioate linkage
  modified_base 45..46: mod_base = OTHER; note = phosphorothioate linkage
  modified_base 64..65: mod_base = OTHER; note = phosphorothioate linkage
  modified_base 97..100: mod_base = OTHER; note = phosphorothioate linkage
  misc_feature 1..100: note = RNA
  misc_feature 101..103: note = Optionally DNA or RNA

SEQ ID NO: 2886 - DNA, 103 bp, synthetic construct; identical to SEQ ID NO: 1797
  source 1..103: mol_type = other DNA
  modified_base 1: mod_base = OTHER; note = 2'-O-methyl ribonucleotide
  modified_base 2: mod_base = OTHER; note = 2'-O-methyl ribonucleotide
  modified_base 3: mod_base = OTHER; note = 2'-O-methyl ribonucleotide
  modified_base 21: mod_base = OTHER; note = 2'-O-methyl ribonucleotide
  modified_base 28: mod_base = OTHER; note = 2'-O-methyl ribonucleotide
  modified_base 29: mod_base = OTHER; note = 2'-O-methyl ribonucleotide
  modified_base 30: mod_base = OTHER; note = 2'-O-methyl ribonucleotide
  modified_base 31: mod_base = OTHER; note = 2'-O-methyl ribonucleotide
  modified_base 32: mod_base = OTHER; note = 2'-O-methyl ribonucleotide
  modified_base 34: mod_base = OTHER; note = 2'-O-methyl ribonucleotide
  modified_base 35: mod_base = OTHER; note = 2'-O-methyl ribonucleotide
  modified_base 36: mod_base = OTHER; note = 2'-O-methyl ribonucleotide
  modified_base 37: mod_base = OTHER; note = 2'-O-methyl ribonucleotide
  modified_base 38: mod_base = OTHER; note = 2'-O-methyl ribonucleotide
  modified_base 39: mod_base = OTHER; note = 2'-O-methyl ribonucleotide
  modified_base 40: mod_base = OTHER; note = 2'-O-methyl ribonucleotide
  modified_base 41: mod_base = OTHER; note = 2'-O-methyl ribonucleotide
  modified_base 42: mod_base = OTHER; note = 2'-O-methyl ribonucleotide
  modified_base 46: mod_base = OTHER; note = 2'-O-methyl ribonucleotide
  modified_base 48: mod_base = OTHER; note = 2'-O-methyl ribonucleotide
  modified_base 50: mod_base = OTHER; note = 2'-O-methyl ribonucleotide
  modified_base 52: mod_base = OTHER; note = 2'-O-methyl ribonucleotide
  modified_base 53: mod_base = OTHER; note = 2'-O-methyl ribonucleotide
  modified_base 54: mod_base = OTHER; note = 2'-O-methyl ribonucleotide
  modified_base 55: mod_base = OTHER; note = 2'-O-methyl ribonucleotide
  modified_base 56: mod_base = OTHER; note = 2'-O-methyl ribonucleotide
  modified_base 57: mod_base = OTHER; note = 2'-O-methyl ribonucleotide
  modified_base 60: mod_base = OTHER; note = 2'-O-methyl ribonucleotide
  modified_base 61: mod_base = OTHER; note = 2'-O-methyl ribonucleotide
  modified_base 66: mod_base = OTHER; note = 2'-O-methyl ribonucleotide
  modified_base 67: mod_base = OTHER; note = 2'-O-methyl ribonucleotide
  modified_base 70: mod_base = OTHER; note = 2'-O-methyl ribonucleotide
  modified_base 71: mod_base = OTHER; note = 2'-O-methyl ribonucleotide
  modified_base 72: mod_base = OTHER; note = 2'-O-methyl ribonucleotide
  modified_base 74: mod_base = OTHER; note = 2'-O-methyl ribonucleotide
  modified_base 75: mod_base = OTHER; note = 2'-O-methyl ribonucleotide
  modified_base 76: mod_base = OTHER; note = 2'-O-methyl ribonucleotide
  modified_base 77: mod_base = OTHER; note = 2'-O-methyl ribonucleotide
  modified_base 78: mod_base = OTHER; note = 2'-O-methyl ribonucleotide
  modified_base 79: mod_base = OTHER; note = 2'-O-methyl ribonucleotide
  modified_base 80: mod_base = OTHER; note = 2'-O-methyl ribonucleotide
  modified_base 82: mod_base = OTHER; note = 2'-O-methyl ribonucleotide
  modified_base 83: mod_base = OTHER; note = 2'-O-methyl ribonucleotide
  modified_base 84: mod_base = OTHER; note = 2'-O-methyl ribonucleotide
  modified_base 85: mod_base = OTHER; note = 2'-O-methyl ribonucleotide
  modified_base 86: mod_base = OTHER; note = 2'-O-methyl ribonucleotide
  modified_base 87: mod_base = OTHER; note = 2'-O-methyl ribonucleotide
  modified_base 89: mod_base = OTHER; note = 2'-O-methyl ribonucleotide
  modified_base 92: mod_base = OTHER; note = 2'-O-methyl ribonucleotide
  modified_base 93: mod_base = OTHER; note = 2'-O-methyl ribonucleotide
  modified_base 94: mod_base = OTHER; note = 2'-O-methyl ribonucleotide
  modified_base 95: mod_base = OTHER; note = 2'-O-methyl ribonucleotide
  modified_base 96: mod_base = OTHER; note = 2'-O-methyl ribonucleotide
  modified_base 97: mod_base = OTHER; note = 2'-O-methyl ribonucleotide
  modified_base 98: mod_base = OTHER; note = 2'-O-methyl ribonucleotide
  modified_base 99: mod_base = OTHER; note = 2'-O-methyl ribonucleotide
  modified_base 100: mod_base = OTHER; note = 2'-O-methyl ribonucleotide
  modified_base 101: mod_base = OTHER; note = uniform ribonucleotides (A, C, G, inosine or U), deoxynucleotides (A, G, C, inosine or T), ribonebularine, 2'-O-methylnebularine or deoxynebularine
  modified_base 102: mod_base = OTHER; note = uniform ribonucleotides (A, C, G, inosine or U), deoxynucleotides (A, G, C, inosine or T), ribonebularine, 2'-O-methylnebularine or deoxynebularine
  modified_base 103: mod_base = OTHER; note = uniform ribonucleotides (A, C, G, inosine or U), deoxynucleotides (A, G, C, inosine or T), ribonebularine, 2'-O-methylnebularine or deoxynebularine
  modified_base 1..4: mod_base = OTHER; note = phosphorothioate linkage
  modified_base 25..26: mod_base = OTHER; note = phosphorothioate linkage
  modified_base 45..46: mod_base = OTHER; note = phosphorothioate linkage
  modified_base 64..65: mod_base = OTHER; note = phosphorothioate linkage
  modified_base 97..100: mod_base = OTHER; note = phosphorothioate linkage
  misc_feature 1..100: note = RNA
  misc_feature 101..103: note = Optionally DNA or RNA

SEQ ID NO: 2887 - DNA, 103 bp, synthetic construct; identical to SEQ ID NO: 1797
  source 1..103: mol_type = other DNA
  modified_base 1: mod_base = OTHER; note = 2'-O-methyl ribonucleotide
  modified_base 2: mod_base = OTHER; note = 2'-O-methyl ribonucleotide
  modified_base 3: mod_base = OTHER; note = 2'-O-methyl ribonucleotide
  modified_base 21: mod_base = OTHER; note = 2'-O-methyl ribonucleotide
  modified_base 28: mod_base = OTHER; note = 2'-O-methyl ribonucleotide
  modified_base 29: mod_base = OTHER; note = 2'-O-methyl ribonucleotide
  modified_base 30: mod_base = OTHER; note = 2'-O-methyl ribonucleotide
  modified_base 31: mod_base = OTHER; note = 2'-O-methyl ribonucleotide
  modified_base 32: mod_base = OTHER; note = 2'-O-methyl ribonucleotide
  modified_base 33: mod_base = OTHER; note = 2'-O-methyl ribonucleotide
  modified_base 34: mod_base = OTHER; note = 2'-O-methyl ribonucleotide
  modified_base 35: mod_base = OTHER; note = 2'-O-methyl ribonucleotide
  modified_base 36: mod_base = OTHER; note = 2'-O-methyl ribonucleotide
  modified_base 37: mod_base = OTHER; note = 2'-O-methyl ribonucleotide
  modified_base 38: mod_base = OTHER; note = 2'-O-methyl ribonucleotide
  modified_base 39: mod_base = OTHER; note = 2'-O-methyl ribonucleotide
  modified_base 40: mod_base = OTHER; note = 2'-O-methyl ribonucleotide
  modified_base 41: mod_base = OTHER; note = 2'-O-methyl ribonucleotide
  modified_base 42: mod_base = OTHER; note = 2'-O-methyl ribonucleotide
  modified_base 46: mod_base = OTHER; note = 2'-O-methyl ribonucleotide
  modified_base 48: mod_base = OTHER; note = 2'-O-methyl ribonucleotide
  modified_base 50: mod_base = OTHER; note = 2'-O-methyl ribonucleotide
  modified_base 52: mod_base = OTHER; note = 2'-O-methyl ribonucleotide
  modified_base 53: mod_base = OTHER; note = 2'-O-methyl ribonucleotide
  modified_base 54: mod_base = OTHER; note = 2'-O-methyl ribonucleotide
  modified_base 55: mod_base = OTHER; note = 2'-O-methyl ribonucleotide
  modified_base 56: mod_base = OTHER; note = 2'-O-methyl ribonucleotide
  modified_base 57: mod_base = OTHER; note = 2'-O-methyl ribonucleotide
  modified_base 60: mod_base = OTHER; note = 2'-O-methyl ribonucleotide
  modified_base 61: mod_base = OTHER; note = 2'-O-methyl ribonucleotide
  modified_base 66: mod_base = OTHER; note = 2'-O-methyl ribonucleotide
  modified_base 67: mod_base = OTHER; note = 2'-O-methyl ribonucleotide
  modified_base 70: mod_base = OTHER; note = 2'-O-methyl ribonucleotide
  modified_base 71: mod_base = OTHER; note = 2'-O-methyl ribonucleotide
  modified_base 72: mod_base = OTHER; note = 2'-O-methyl ribonucleotide
  modified_base 73: mod_base = OTHER; note = 2'-O-methyl ribonucleotide
  modified_base 74: mod_base = OTHER; note = 2'-O-methyl ribonucleotide
  modified_base 75: mod_base = OTHER; note = 2'-O-methyl ribonucleotide
  modified_base 76: mod_base = OTHER; note = 2'-O-methyl ribonucleotide
  modified_base 77: mod_base = OTHER; note = 2'-O-methyl ribonucleotide
  modified_base 78: mod_base = OTHER; note = 2'-O-methyl ribonucleotide
  modified_base 79: mod_base = OTHER; note = 2'-O-methyl ribonucleotide
  modified_base 80: mod_base = OTHER; note = 2'-O-methyl ribonucleotide
  modified_base 81: mod_base = OTHER; note = 2'-O-methyl ribonucleotide
  modified_base 83: mod_base = OTHER; note = 2'-O-methyl ribonucleotide
  modified_base 84: mod_base = OTHER; note = 2'-O-methyl ribonucleotide
  modified_base 85: mod_base = OTHER; note = 2'-O-methyl ribonucleotide
  modified_base 86: mod_base = OTHER; note = 2'-O-methyl ribonucleotide
  modified_base 87: mod_base = OTHER; note = 2'-O-methyl ribonucleotide
  modified_base 88: mod_base = OTHER; note = 2'-O-methyl ribonucleotide
  modified_base 89: mod_base = OTHER; note = 2'-O-methyl ribonucleotide
  modified_base 90: mod_base = OTHER; note = 2'-O-methyl ribonucleotide
  modified_base 91: mod_base = OTHER; note = 2'-O-methyl ribonucleotide
  modified_base 92: mod_base = OTHER; note = 2'-O-methyl ribonucleotide
  modified_base 93: mod_base = OTHER; note = 2'-O-methyl ribonucleotide
  modified_base 94: mod_base = OTHER; note = 2'-O-methyl ribonucleotide
  modified_base 95: mod_base = OTHER; note = 2'-O-methyl ribonucleotide
  modified_base 96: mod_base = OTHER; note = 2'-O-methyl ribonucleotide
  modified_base 97: mod_base = OTHER; note = 2'-O-methyl ribonucleotide
  modified_base 98: mod_base = OTHER; note = 2'-O-methyl ribonucleotide
  modified_base 99: mod_base = OTHER; note = 2'-O-methyl ribonucleotide
  modified_base 100: mod_base = OTHER; note = 2'-O-methyl ribonucleotide
  modified_base 101: mod_base = OTHER; note = uniform ribonucleotides (A, C, G, inosine or U), deoxynucleotides (A, G, C, inosine or T), ribonebularine, 2'-O-methylnebularine or deoxynebularine
  modified_base 102: mod_base = OTHER; note = uniform ribonucleotides (A, C, G, inosine or U), deoxynucleotides (A, G, C, inosine or T), ribonebularine, 2'-O-methylnebularine or deoxynebularine
  modified_base 103: mod_base = OTHER; note = uniform ribonucleotides (A, C, G, inosine or U), deoxynucleotides (A, G, C, inosine or T), ribonebularine, 2'-O-methylnebularine or deoxynebularine
  modified_base 1..3: mod_base = OTHER; note = phosphorothioate linkage
  modified_base 97..100: mod_base = OTHER; note = phosphorothioate linkage
  misc_feature 1..100: note = RNA
  misc_feature 101..103: note = Optionally DNA or RNA

SEQ ID NO: 2888 - DNA, 103 bp, synthetic construct; identical to SEQ ID NO: 1797
  source 1..103: mol_type = other DNA
  modified_base 1: mod_base = OTHER; note = 2'-O-methyl ribonucleotide
  modified_base 2: mod_base = OTHER; note = 2'-O-methyl ribonucleotide
  modified_base 3: mod_base = OTHER; note = 2'-O-methyl ribonucleotide
  modified_base 21: mod_base = OTHER; note = 2'-O-methyl ribonucleotide
  modified_base 28: mod_base = OTHER; note = 2'-O-methyl ribonucleotide
  modified_base 29: mod_base = OTHER; note = 2'-O-methyl ribonucleotide
  modified_base 30: mod_base = OTHER; note = 2'-O-methyl ribonucleotide
  modified_base 31: mod_base = OTHER; note = 2'-O-methyl ribonucleotide
  modified_base 32: mod_base = OTHER; note = 2'-O-methyl ribonucleotide
  modified_base 34: mod_base = OTHER; note = 2'-O-methyl ribonucleotide
  modified_base 35: mod_base = OTHER; note = 2'-O-methyl ribonucleotide
  modified_base 36: mod_base = OTHER; note = 2'-O-methyl ribonucleotide
  modified_base 37: mod_base = OTHER; note = 2'-O-methyl ribonucleotide
  modified_base 38: mod_base = OTHER; note = 2'-O-methyl ribonucleotide
  modified_base 39: mod_base = OTHER; note = 2'-O-methyl ribonucleotide
  modified_base 40: mod_base = OTHER; note = 2'-O-methyl ribonucleotide
  modified_base 41: mod_base = OTHER; note = 2'-O-methyl ribonucleotide
  modified_base 42: mod_base = OTHER; note = 2'-O-methyl ribonucleotide
  modified_base 46: mod_base = OTHER; note = 2'-O-methyl ribonucleotide
  modified_base 48: mod_base = OTHER; note = 2'-O-methyl ribonucleotide
  modified_base 50: mod_base = OTHER; note = 2'-O-methyl ribonucleotide
  modified_base 52: mod_base = OTHER; note = 2'-O-methyl ribonucleotide
  modified_base 53: mod_base = OTHER; note = 2'-O-methyl ribonucleotide
  modified_base 54: mod_base = OTHER; note = 2'-O-methyl ribonucleotide
  modified_base 55: mod_base = OTHER; note = 2'-O-methyl ribonucleotide
  modified_base 56: mod_base = OTHER; note = 2'-O-methyl ribonucleotide
  modified_base 57: mod_base = OTHER; note = 2'-O-methyl ribonucleotide
  modified_base 60: mod_base = OTHER; note = 2'-O-methyl ribonucleotide
  modified_base 61: mod_base = OTHER; note = 2'-O-methyl ribonucleotide
  modified_base 66: mod_base = OTHER; note = 2'-O-methyl ribonucleotide
  modified_base 67: mod_base = OTHER; note = 2'-O-methyl ribonucleotide
  modified_base 70: mod_base = OTHER; note = 2'-O-methyl ribonucleotide
  modified_base 71: mod_base = OTHER; note = 2'-O-methyl ribonucleotide
  modified_base 72: mod_base = OTHER; note = 2'-O-methyl ribonucleotide
  modified_base 74: mod_base = OTHER; note = 2'-O-methyl ribonucleotide
  modified_base 75: mod_base = OTHER; note = 2'-O-methyl ribonucleotide
  modified_base 76: mod_base = OTHER; note = 2'-O-methyl ribonucleotide
  modified_base 77: mod_base = OTHER; note = 2'-O-methyl ribonucleotide
  modified_base 78: mod_base = OTHER; note = 2'-O-methyl ribonucleotide
  modified_base 79: mod_base = OTHER; note = 2'-O-methyl ribonucleotide
  modified_base 80: mod_base = OTHER; note = 2'-O-methyl ribonucleotide
  modified_base 81: mod_base = OTHER; note = 2'-O-methyl ribonucleotide
  modified_base 83: mod_base = OTHER; note = 2'-O-methyl ribonucleotide
  modified_base 84: mod_base = OTHER; note = 2'-O-methyl ribonucleotide
  modified_base 85: mod_base = OTHER; note = 2'-O-methyl ribonucleotide
  modified_base 86: mod_base = OTHER; note = 2'-O-methyl ribonucleotide
  modified_base 87: mod_base = OTHER; note = 2'-O-methyl ribonucleotide
  modified_base 88: mod_base = OTHER; note = 2'-O-methyl ribonucleotide
  modified_base 89: mod_base = OTHER; note = 2'-O-methyl ribonucleotide
  modified_base 90: mod_base = OTHER; note = 2'-O-methyl ribonucleotide
  modified_base 91: mod_base = OTHER; note = 2'-O-methyl ribonucleotide
  modified_base 92: mod_base = OTHER; note = 2'-O-methyl ribonucleotide
  modified_base 93: mod_base = OTHER; note = 2'-O-methyl ribonucleotide
  modified_base 94: mod_base = OTHER; note = 2'-O-methyl ribonucleotide
  modified_base 95: mod_base = OTHER; note = 2'-O-methyl ribonucleotide
  modified_base 96: mod_base = OTHER; note = 2'-O-methyl ribonucleotide
  modified_base 97: mod_base = OTHER; note = 2'-O-methyl ribonucleotide
  modified_base 98: mod_base = OTHER; note = 2'-O-methyl ribonucleotide
  modified_base 99: mod_base = OTHER; note = 2'-O-methyl ribonucleotide
  modified_base 100: mod_base = OTHER; note = 2'-O-methyl ribonucleotide
  modified_base 101: mod_base = OTHER; note = uniform ribonucleotides (A, C, G, inosine or U), deoxynucleotides (A, G, C, inosine or T), ribonebularine, 2'-O-methylnebularine or deoxynebularine
  modified_base 102: mod_base = OTHER; note = uniform ribonucleotides (A, C, G, inosine or U), deoxynucleotides (A, G, C, inosine or T), ribonebularine, 2'-O-methylnebularine or deoxynebularine
  modified_base 103: mod_base = OTHER; note = uniform ribonucleotides (A, C, G, inosine or U), deoxynucleotides (A, G, C, inosine or T), ribonebularine, 2'-O-methylnebularine or deoxynebularine
  modified_base 1..3: mod_base = OTHER; note = phosphorothioate linkage
  modified_base 97..100: mod_base = OTHER; note = phosphorothioate linkage
  misc_feature 1..100: note = RNA
  misc_feature 101..103: note = Optionally DNA or RNA

SEQ ID NO: 2889 - DNA, 103 bp, synthetic construct; identical to SEQ ID NO: 1797
  source 1..103: mol_type = other DNA
  modified_base 1: mod_base = OTHER; note = 2'-O-methyl ribonucleotide
  modified_base 2: mod_base = OTHER; note = 2'-O-methyl ribonucleotide
  modified_base 3: mod_base = OTHER; note = 2'-O-methyl ribonucleotide
  modified_base 21: mod_base = OTHER; note = 2'-O-methyl ribonucleotide
  modified_base 28: mod_base = OTHER; note = 2'-O-methyl ribonucleotide
  modified_base 29: mod_base = OTHER; note = 2'-O-methyl ribonucleotide
  modified_base 30: mod_base = OTHER; note = 2'-O-methyl ribonucleotide
  modified_base 31: mod_base = OTHER; note = 2'-O-methyl ribonucleotide
  modified_base 32: mod_base = OTHER; note = 2'-O-methyl ribonucleotide
  modified_base 33: mod_base = OTHER; note = 2'-O-methyl ribonucleotide
  modified_base 34: mod_base = OTHER; note = 2'-O-methyl ribonucleotide
  modified_base 35: mod_base = OTHER; note = 2'-O-methyl ribonucleotide
  modified_base 36: mod_base = OTHER; note = 2'-O-methyl ribonucleotide
  modified_base 37: mod_base = OTHER; note = 2'-O-methyl ribonucleotide
  modified_base 38: mod_base = OTHER; note = 2'-O-methyl ribonucleotide
  modified_base 39: mod_base = OTHER; note = 2'-O-methyl ribonucleotide
  modified_base 40: mod_base = OTHER; note = 2'-O-methyl ribonucleotide
  modified_base 41: mod_base = OTHER; note = 2'-O-methyl ribonucleotide
  modified_base 42: mod_base = OTHER; note = 2'-O-methyl ribonucleotide
  modified_base 46: mod_base = OTHER; note = 2'-O-methyl ribonucleotide
  modified_base 48: mod_base = OTHER; note = 2'-O-methyl ribonucleotide
  modified_base 50: mod_base = OTHER; note = 2'-O-methyl ribonucleotide
  modified_base 52: mod_base = OTHER; note = 2'-O-methyl ribonucleotide
  modified_base 53: mod_base = OTHER; note = 2'-O-methyl ribonucleotide
  modified_base 54: mod_base = OTHER; note = 2'-O-methyl ribonucleotide
  modified_base 57: mod_base = OTHER; note = 2'-O-methyl ribonucleotide
  modified_base 61: mod_base = OTHER; note = 2'-O-methyl ribonucleotide
  modified_base 66: mod_base = OTHER; note = 2'-O-methyl ribonucleotide
  modified_base 67: mod_base = OTHER; note = 2'-O-methyl ribonucleotide
  modified_base 70: mod_base = OTHER; note = 2'-O-methyl ribonucleotide
  modified_base 71: mod_base = OTHER; note = 2'-O-methyl ribonucleotide
  modified_base 72: mod_base = OTHER; note = 2'-O-methyl ribonucleotide
  modified_base 74: mod_base = OTHER; note = 2'-O-methyl ribonucleotide
  modified_base 75: mod_base = OTHER; note = 2'-O-methyl ribonucleotide
  modified_base 76: mod_base = OTHER; note = 2'-O-methyl ribonucleotide
  modified_base 77: mod_base = OTHER; note = 2'-O-methyl ribonucleotide
  modified_base 78: mod_base = OTHER; note = 2'-O-methyl ribonucleotide
  modified_base 79: mod_base = OTHER; note = 2'-O-methyl ribonucleotide
  modified_base 80: mod_base = OTHER; note = 2'-O-methyl ribonucleotide
  modified_base 82: mod_base = OTHER; note = 2'-O-methyl ribonucleotide
  modified_base 83: mod_base = OTHER; note = 2'-O-methyl ribonucleotide
  modified_base 84: mod_base = OTHER; note = 2'-O-methyl ribonucleotide
  modified_base 85: mod_base = OTHER; note = 2'-O-methyl ribonucleotide
  modified_base 86: mod_base = OTHER; note = 2'-O-methyl ribonucleotide
  modified_base 87: mod_base = OTHER; note = 2'-O-methyl ribonucleotide
  modified_base 89: mod_base = OTHER; note = 2'-O-methyl ribonucleotide
  modified_base 92: mod_base = OTHER; note = 2'-O-methyl ribonucleotide
  modified_base 93: mod_base = OTHER; note = 2'-O-methyl ribonucleotide
  modified_base 94: mod_base = OTHER; note = 2'-O-methyl ribonucleotide
  modified_base 95: mod_base = OTHER; note = 2'-O-methyl ribonucleotide
  modified_base 96: mod_base = OTHER; note = 2'-O-methyl ribonucleotide
  modified_base 97: mod_base = OTHER; note = 2'-O-methyl ribonucleotide
  modified_base 98: mod_base = OTHER; note = 2'-O-methyl ribonucleotide
  modified_base 99: mod_base = OTHER; note = 2'-O-methyl ribonucleotide
  modified_base 100: mod_base = OTHER; note = 2'-O-methyl ribonucleotide
  modified_base 101: mod_base = OTHER; note = uniform ribonucleotides (A, C, G, inosine or U), deoxynucleotides (A, G, C, inosine or T), ribonebularine, 2'-O-methylnebularine or deoxynebularine
  modified_base 102: mod_base = OTHER; note = uniform ribonucleotides (A, C, G, inosine or U), deoxynucleotides (A, G, C, inosine or T), ribonebularine, 2'-O-methylnebularine or deoxynebularine
  modified_base 103: mod_base = OTHER; note = uniform ribonucleotides (A, C, G, inosine or U), deoxynucleotides (A, G, C, inosine or T), ribonebularine, 2'-O-methylnebularine or deoxynebularine
  modified_base 1..3: mod_base = OTHER; note = phosphorothioate linkage
  modified_base 97..100: mod_base = OTHER; note = phosphorothioate linkage
  misc_feature 1..100: note = RNA
  misc_feature 101..103: note = Optionally DNA or RNA

SEQ ID NO: 2890 - DNA, 103 bp, synthetic construct; identical to SEQ ID NO: 1797
  source 1..103: mol_type = other DNA
  modified_base 1: mod_base = OTHER; note = 2'-O-methyl ribonucleotide
  modified_base 2: mod_base = OTHER; note = 2'-O-methyl ribonucleotide
  modified_base 3: mod_base = OTHER; note = 2'-O-methyl ribonucleotide
  modified_base 21: mod_base = OTHER; note = 2'-O-methyl ribonucleotide
  modified_base 28: mod_base = OTHER; note = 2'-O-methyl ribonucleotide
  modified_base 29: mod_base = OTHER; note = 2'-O-methyl ribonucleotide
  modified_base 30: mod_base = OTHER; note = 2'-O-methyl ribonucleotide
  modified_base 31: mod_base = OTHER; note = 2'-O-methyl ribonucleotide
  modified_base 32: mod_base = OTHER; note = 2'-O-methyl ribonucleotide
  modified_base 33: mod_base = OTHER; note = 2'-O-methyl ribonucleotide
  modified_base 34: mod_base = OTHER; note = 2'-O-methyl ribonucleotide
  modified_base 35: mod_base = OTHER; note = 2'-O-methyl ribonucleotide
  modified_base 36: mod_base = OTHER; note = 2'-O-methyl ribonucleotide
  modified_base 37: mod_base = OTHER; note = 2'-O-methyl ribonucleotide
  modified_base 38: mod_base = OTHER; note = 2'-O-methyl ribonucleotide
  modified_base 39: mod_base = OTHER; note = 2'-O-methyl ribonucleotide
  modified_base 40: mod_base = OTHER; note = 2'-O-methyl ribonucleotide
  modified_base 41: mod_base = OTHER; note = 2'-O-methyl ribonucleotide
  modified_base 42: mod_base = OTHER; note = 2'-O-methyl ribonucleotide
  modified_base 46: mod_base = OTHER; note = 2'-O-methyl ribonucleotide
  modified_base 48: mod_base = OTHER; note = 2'-O-methyl ribonucleotide
  modified_base 50: mod_base = OTHER; note = 2'-O-methyl ribonucleotide
  modified_base 52: mod_base = OTHER; note = 2'-O-methyl ribonucleotide
  modified_base 53: mod_base = OTHER; note = 2'-O-methyl ribonucleotide
  modified_base 54: mod_base = OTHER; note = 2'-O-methyl ribonucleotide
  modified_base 55: mod_base = OTHER; note = 2'-O-methyl ribonucleotide
  modified_base 56: mod_base = OTHER; note = 2'-O-methyl ribonucleotide
  modified_base 57: mod_base = OTHER; note = 2'-O-methyl ribonucleotide
  modified_base 60: mod_base = OTHER; note = 2'-O-methyl ribonucleotide
  modified_base 61: mod_base = OTHER; note = 2'-O-methyl ribonucleotide
  modified_base 66: mod_base = OTHER; note = 2'-O-methyl ribonucleotide
  modified_base 67: mod_base = OTHER; note = 2'-O-methyl ribonucleotide
  modified_base 70: mod_base = OTHER; note = 2'-O-methyl ribonucleotide
  modified_base 71: mod_base = OTHER; note = 2'-O-methyl ribonucleotide
  modified_base 72: mod_base = OTHER; note = 2'-O-methyl ribonucleotide
  modified_base 74: mod_base = OTHER; note = 2'-O-methyl ribonucleotide
  modified_base 75: mod_base = OTHER; note = 2'-O-methyl ribonucleotide
  modified_base 76: mod_base = OTHER; note = 2'-O-methyl ribonucleotide
  modified_base 77: mod_base = OTHER; note = 2'-O-methyl ribonucleotide
  modified_base 78: mod_base = OTHER; note = 2'-O-methyl ribonucleotide
  modified_base 79: mod_base = OTHER; note = 2'-O-methyl ribonucleotide
  modified_base 80: mod_base = OTHER; note = 2'-O-methyl ribonucleotide
  modified_base 82: mod_base = OTHER; note = 2'-O-methyl ribonucleotide
  modified_base 83: mod_base = OTHER; note = 2'-O-methyl ribonucleotide
  modified_base 84: mod_base = OTHER; note = 2'-O-methyl ribonucleotide
  modified_base 85: mod_base = OTHER; note = 2'-O-methyl ribonucleotide
  modified_base 86: mod_base = OTHER; note = 2'-O-methyl ribonucleotide
  modified_base 87: mod_base = OTHER; note = 2'-O-methyl ribonucleotide
  modified_base 89: mod_base = OTHER; note = 2'-O-methyl ribonucleotide
  modified_base 92: mod_base = OTHER; note = 2'-O-methyl ribonucleotide
  modified_base 93: mod_base = OTHER; note = 2'-O-methyl ribonucleotide
  modified_base 94: mod_base = OTHER; note = 2'-O-methyl ribonucleotide
  modified_base 95: mod_base = OTHER; note = 2'-O-methyl ribonucleotide
  modified_base 96: mod_base = OTHER; note = 2'-O-methyl ribonucleotide
  modified_base 97: mod_base = OTHER; note = 2'-O-methyl ribonucleotide
  modified_base 98: mod_base = OTHER; note = 2'-O-methyl ribonucleotide
  modified_base 99: mod_base = OTHER; note = 2'-O-methyl ribonucleotide
  modified_base 100: mod_base = OTHER; note = 2'-O-methyl ribonucleotide
  modified_base 101: mod_base = OTHER; note = uniform ribonucleotides (A, C, G, inosine or U), deoxynucleotides (A, G, C, inosine or T), ribonebularine, 2'-O-methylnebularine or deoxynebularine
  modified_base 102: mod_base = OTHER; note = uniform ribonucleotides (A, C, G, inosine or U), deoxynucleotides (A, G, C, inosine or T), ribonebularine, 2'-O-methylnebularine or deoxynebularine
  modified_base 103: mod_base = OTHER; note = uniform ribonucleotides (A, C, G, inosine or U), deoxynucleotides (A, G, C, inosine or T), ribonebularine, 2'-O-methylnebularine or deoxynebularine
  modified_base 1..3: mod_base = OTHER; note = phosphorothioate linkage
  modified_base 97..100: mod_base = OTHER; note = phosphorothioate linkage
  misc_feature 1..100: note = RNA
  misc_feature 101..103: note = Optionally DNA or RNA

SEQ ID NO: 2891 - DNA, 103 bp, synthetic construct; identical to SEQ ID NO: 1797
  source 1..103: mol_type = other DNA
  modified_base 1: mod_base = OTHER; note = 2'-O-methyl ribonucleotide
  modified_base 2: mod_base = OTHER; note = 2'-O-methyl ribonucleotide
  modified_base 3: mod_base = OTHER; note = 2'-O-methyl ribonucleotide
  modified_base 21: mod_base = OTHER; note = 2'-O-methyl ribonucleotide
  modified_base 28: mod_base = OTHER; note = 2'-O-methyl ribonucleotide
  modified_base 29: mod_base = OTHER; note = 2'-O-methyl ribonucleotide
  modified_base 30: mod_base = OTHER; note = 2'-O-methyl ribonucleotide
  modified_base 31: mod_base = OTHER; note = 2'-O-methyl ribonucleotide
  modified_base 32: mod_base = OTHER; note = 2'-O-methyl ribonucleotide
  modified_base 33: mod_base = OTHER; note = 2'-O-methyl ribonucleotide
  modified_base 34: mod_base = OTHER; note = 2'-O-methyl ribonucleotide
  modified_base 35: mod_base = OTHER; note = 2'-O-methyl ribonucleotide
  modified_base 36: mod_base = OTHER; note = 2'-O-methyl ribonucleotide
  modified_base 37: mod_base = OTHER; note = 2'-O-methyl ribonucleotide
  modified_base 38: mod_base = OTHER; note = 2'-O-methyl ribonucleotide
  modified_base 39: mod_base = OTHER; note = 2'-O-methyl ribonucleotide
  modified_base 40: mod_base = OTHER; note = 2'-O-methyl ribonucleotide
  modified_base 41: mod_base = OTHER; note = 2'-O-methyl ribonucleotide
  modified_base 42: mod_base = OTHER; note = 2'-O-methyl ribonucleotide
  modified_base 46: mod_base = OTHER; note = 2'-O-methyl ribonucleotide
  modified_base 48: mod_base = OTHER; note = 2'-O-methyl ribonucleotide
  modified_base 50: mod_base = OTHER; note = 2'-O-methyl ribonucleotide
  modified_base 52: mod_base = OTHER; note = 2'-O-methyl ribonucleotide
  modified_base 53: mod_base = OTHER; note = 2'-O-methyl ribonucleotide
  modified_base 54: mod_base = OTHER; note = 2'-O-methyl ribonucleotide
  modified_base 57: mod_base = OTHER; note = 2'-O-methyl ribonucleotide
  modified_base 61: mod_base = OTHER; note = 2'-O-methyl ribonucleotide
  modified_base 66: mod_base = OTHER; note = 2'-O-methyl ribonucleotide
  modified_base 67: mod_base = OTHER; note = 2'-O-methyl ribonucleotide
  modified_base 70: mod_base = OTHER; note = 2'-O-methyl ribonucleotide
  modified_base 71: mod_base = OTHER; note = 2'-O-methyl ribonucleotide
  modified_base 72: mod_base = OTHER; note = 2'-O-methyl ribonucleotide
  modified_base 73: mod_base = OTHER; note = 2'-O-methyl ribonucleotide
  modified_base 74: mod_base = OTHER; note = 2'-O-methyl ribonucleotide
  modified_base 75: mod_base = OTHER; note = 2'-O-methyl ribonucleotide
  modified_base 76: mod_base = OTHER; note = 2'-O-methyl ribonucleotide
  modified_base 77: mod_base = OTHER; note = 2'-O-methyl ribonucleotide
  modified_base 78: mod_base = OTHER; note = 2'-O-methyl ribonucleotide
  modified_base 79: mod_base = OTHER; note = 2'-O-methyl ribonucleotide
  modified_base 80: mod_base = OTHER; note = 2'-O-methyl ribonucleotide
  modified_base 82: mod_base = OTHER; note = 2'-O-methyl ribonucleotide
  modified_base 83: mod_base = OTHER; note = 2'-O-methyl ribonucleotide
  modified_base 84: mod_base = OTHER; note = 2'-O-methyl ribonucleotide
  modified_base 85: mod_base = OTHER; note = 2'-O-methyl ribonucleotide
  modified_base 86: mod_base = OTHER; note = 2'-O-methyl ribonucleotide
  modified_base 87: mod_base = OTHER; note = 2'-O-methyl ribonucleotide
  modified_base 89: mod_base = OTHER; note = 2'-O-methyl ribonucleotide
  modified_base 92: mod_base = OTHER; note = 2'-O-methyl ribonucleotide
  modified_base 93: mod_base = OTHER; note = 2'-O-methyl ribonucleotide
  modified_base 94: mod_base = OTHER; note = 2'-O-methyl ribonucleotide
  modified_base 95: mod_base = OTHER; note = 2'-O-methyl ribonucleotide
  modified_base 96: mod_base = OTHER; note = 2'-O-methyl ribonucleotide
  modified_base 97: mod_base = OTHER; note = 2'-O-methyl ribonucleotide
  modified_base 98: mod_base = OTHER; note = 2'-O-methyl ribonucleotide
  modified_base 99: mod_base = OTHER; note = 2'-O-methyl ribonucleotide
  modified_base 100: mod_base = OTHER; note = 2'-O-methyl ribonucleotide
  modified_base 101: mod_base = OTHER; note = uniform ribonucleotides (A, C, G, inosine or U), deoxynucleotides (A, G, C, inosine or T), ribonebularine, 2'-O-methylnebularine or deoxynebularine
  modified_base 102: mod_base = OTHER; note = uniform ribonucleotides (A, C, G, inosine or U), deoxynucleotides (A, G, C, inosine or T), ribonebularine, 2'-O-methylnebularine or deoxynebularine
  modified_base 103: mod_base = OTHER; note = uniform ribonucleotides (A, C, G, inosine or U), deoxynucleotides (A, G, C, inosine or T), ribonebularine, 2'-O-methylnebularine or deoxynebularine
  modified_base 1..3: mod_base = OTHER; note = phosphorothioate linkage
  modified_base 97..100: mod_base = OTHER; note = phosphorothioate linkage
  misc_feature 1..100: note = RNA
  misc_feature 101..103: note = Optionally DNA or RNA

SEQ ID NO: 2892 - DNA, 103 bp, synthetic construct; identical to SEQ ID NO: 1797
  source 1..103: mol_type = other DNA
  modified_base 1: mod_base = OTHER; note = 2'-O-methyl ribonucleotide
  modified_base 2: mod_base = OTHER; note = 2'-O-methyl ribonucleotide
  modified_base 3: mod_base = OTHER; note = 2'-O-methyl ribonucleotide
  modified_base 21: mod_base = OTHER; note = 2'-O-methyl ribonucleotide
  modified_base 28: mod_base = OTHER; note = 2'-O-methyl ribonucleotide
  modified_base 29: mod_base = OTHER; note = 2'-O-methyl ribonucleotide
  modified_base 30: mod_base = OTHER; note = 2'-O-methyl ribonucleotide
  modified_base 31: mod_base = OTHER; note = 2'-O-methyl ribonucleotide
  modified_base 32: mod_base = OTHER; note = 2'-O-methyl ribonucleotide
  modified_base 33: mod_base = OTHER; note = 2'-O-methyl ribonucleotide
  modified_base 34: mod_base = OTHER; note = 2'-O-methyl ribonucleotide
  modified_base 35: mod_base = OTHER; note = 2'-O-methyl ribonucleotide
  modified_base 36: mod_base = OTHER; note = 2'-O-methyl ribonucleotide
  modified_base 37: mod_base = OTHER; note = 2'-O-methyl ribonucleotide
  modified_base 38: mod_base = OTHER; note = 2'-O-methyl ribonucleotide
  modified_base 39: mod_base = OTHER; note = 2'-O-methyl ribonucleotide
  modified_base 40: mod_base = OTHER; note = 2'-O-methyl ribonucleotide
  modified_base 41: mod_base = OTHER; note = 2'-O-methyl ribonucleotide
  modified_base 42: mod_base = OTHER; note = 2'-O-methyl ribonucleotide
  modified_base 46: mod_base = OTHER; note = 2'-O-methyl ribonucleotide
  modified_base 48: mod_base = OTHER; note = 2'-O-methyl ribonucleotide
  modified_base 50: mod_base = OTHER; note = 2'-O-methyl ribonucleotide
  modified_base 52: mod_base = OTHER; note = 2'-O-methyl ribonucleotide
  modified_base 53: mod_base = OTHER; note = 2'-O-methyl ribonucleotide
  modified_base 54: mod_base = OTHER; note = 2'-O-methyl ribonucleotide
  modified_base 57: mod_base = OTHER; note = 2'-O-methyl ribonucleotide
  modified_base 61: mod_base = OTHER; note = 2'-O-methyl ribonucleotide
  modified_base 66: mod_base = OTHER; note = 2'-O-methyl ribonucleotide
  modified_base 67: mod_base = OTHER; note = 2'-O-methyl ribonucleotide
  modified_base 70: mod_base = OTHER; note = 2'-O-methyl ribonucleotide
  modified_base 71: mod_base = OTHER; note = 2'-O-methyl ribonucleotide
  modified_base 72: mod_base = OTHER; note = 2'-O-methyl ribonucleotide
  modified_base 73: mod_base = OTHER; note = 2'-O-methyl ribonucleotide
  modified_base 74: mod_base = OTHER; note = 2'-O-methyl ribonucleotide
  modified_base 75: mod_base = OTHER; note = 2'-O-methyl ribonucleotide
  modified_base 76: mod_base = OTHER; note = 2'-O-methyl ribonucleotide
  modified_base 77: mod_base = OTHER; note = 2'-O-methyl ribonucleotide
  modified_base 78: mod_base = OTHER; note = 2'-O-methyl ribonucleotide
  modified_base 79: mod_base = OTHER; note = 2'-O-methyl ribonucleotide
  modified_base 80: mod_base = OTHER; note = 2'-O-methyl ribonucleotide
  modified_base 82: mod_base = OTHER; note = 2'-O-methyl ribonucleotide
  modified_base 83: mod_base = OTHER; note = 2'-O-methyl ribonucleotide
  modified_base 84: mod_base = OTHER; note = 2'-O-methyl ribonucleotide
  modified_base 85: mod_base = OTHER; note = 2'-O-methyl ribonucleotide
  modified_base 86: mod_base = OTHER; note = 2'-O-methyl ribonucleotide
  modified_base 87: mod_base = OTHER; note = 2'-O-methyl ribonucleotide
  modified_base 89: mod_base = OTHER; note = 2'-O-methyl ribonucleotide
  modified_base 91: mod_base = OTHER; note = 2'-O-methyl ribonucleotide
  modified_base 92: mod_base = OTHER; note = 2'-O-methyl ribonucleotide
  modified_base 93: mod_base = OTHER; note = 2'-O-methyl ribonucleotide
  modified_base 94: mod_base = OTHER; note = 2'-O-methyl ribonucleotide
  modified_base 95: mod_base = OTHER; note = 2'-O-methyl ribonucleotide
  modified_base 96: mod_base = OTHER; note = 2'-O-methyl ribonucleotide
  modified_base 97: mod_base = OTHER; note = 2'-O-methyl ribonucleotide
  modified_base 98: mod_base = OTHER; note = 2'-O-methyl ribonucleotide
  modified_base 99: mod_base = OTHER; note = 2'-O-methyl ribonucleotide
  modified_base 100: mod_base = OTHER; note = 2'-O-methyl ribonucleotide
  modified_base 101: mod_base = OTHER; note = uniform ribonucleotides (A, C, G, inosine or U), deoxynucleotides (A, G, C, inosine or T), ribonebularine, 2'-O-methylnebularine or deoxynebularine
  modified_base 102: mod_base = OTHER; note = uniform ribonucleotides (A, C, G, inosine or U), deoxynucleotides (A, G, C, inosine or T), ribonebularine, 2'-O-methylnebularine or deoxynebularine
  modified_base 103: mod_base = OTHER; note = uniform ribonucleotides (A, C, G, inosine or U), deoxynucleotides (A, G, C, inosine or T), ribonebularine, 2'-O-methylnebularine or deoxynebularine
  modified_base 1..3: mod_base = OTHER; note = phosphorothioate linkage
  modified_base 97..100: mod_base = OTHER; note = phosphorothioate linkage
  misc_feature 1..100: note = RNA
  misc_feature 101..103: note = Optionally DNA or RNA

SEQ ID NO: 2893 - DNA, 103 bp, synthetic construct; identical to SEQ ID NO: 1797
  source 1..103: mol_type = other DNA
  modified_base 1: mod_base = OTHER; note = 2'-O-methyl ribonucleotide
  modified_base 2: mod_base = OTHER; note = 2'-O-methyl ribonucleotide
  modified_base 3: mod_base = OTHER; note = 2'-O-methyl ribonucleotide
  modified_base 21: mod_base = OTHER; note = 2'-O-methyl ribonucleotide
  modified_base 28: mod_base = OTHER; note = 2'-O-methyl ribonucleotide
  modified_base 29: mod_base = OTHER; note = 2'-O-methyl ribonucleotide
  modified_base 30: mod_base = OTHER; note = 2'-O-methyl ribonucleotide
  modified_base 31: mod_base = OTHER; note = 2'-O-methyl ribonucleotide
  modified_base 32: mod_base = OTHER; note = 2'-O-methyl ribonucleotide
  modified_base 34: mod_base = OTHER; note = 2'-O-methyl ribonucleotide
  modified_base 35: mod_base = OTHER; note = 2'-O-methyl ribonucleotide
  modified_base 36: mod_base = OTHER; note = 2'-O-methyl ribonucleotide
  modified_base 37: mod_base = OTHER; note = 2'-O-methyl ribonucleotide
  modified_base 38: mod_base = OTHER; note = 2'-O-methyl ribonucleotide
  modified_base 39: mod_base = OTHER; note = 2'-O-methyl ribonucleotide
  modified_base 40: mod_base = OTHER; note = 2'-O-methyl ribonucleotide
  modified_base 41: mod_base = OTHER; note = 2'-O-methyl ribonucleotide
  modified_base 42: mod_base = OTHER; note = 2'-O-methyl ribonucleotide
  modified_base 46: mod_base = OTHER; note = 2'-O-methyl ribonucleotide
  modified_base 48: mod_base = OTHER; note = 2'-O-methyl ribonucleotide
  modified_base 50: mod_base = OTHER; note = 2'-O-methyl ribonucleotide
  modified_base 52: mod_base = OTHER; note = 2'-O-methyl ribonucleotide
  modified_base 53: mod_base = OTHER; note = 2'-O-methyl ribonucleotide
  modified_base 54: mod_base = OTHER; note = 2'-O-methyl ribonucleotide
  modified_base 57: mod_base = OTHER; note = 2'-O-methyl ribonucleotide
  modified_base 61: mod_base = OTHER; note = 2'-O-methyl ribonucleotide
  modified_base 66: mod_base = OTHER; note = 2'-O-methyl ribonucleotide
  modified_base 67: mod_base = OTHER; note = 2'-O-methyl ribonucleotide
  modified_base 70: mod_base = OTHER; note = 2'-O-methyl ribonucleotide
  modified_base 71: mod_base = OTHER; note = 2'-O-methyl ribonucleotide
  modified_base 72: mod_base = OTHER; note = 2'-O-methyl ribonucleotide
  modified_base 73: mod_base = OTHER; note = 2'-O-methyl ribonucleotide
  modified_base 74: mod_base = OTHER; note = 2'-O-methyl ribonucleotide
  modified_base 75: mod_base = OTHER; note = 2'-O-methyl ribonucleotide
  modified_base 76: mod_base = OTHER; note = 2'-O-methyl ribonucleotide
  modified_base 77: mod_base = OTHER; note = 2'-O-methyl ribonucleotide
  modified_base 78: mod_base = OTHER; note = 2'-O-methyl ribonucleotide
  modified_base 79: mod_base = OTHER; note = 2'-O-methyl ribonucleotide
  modified_base 80: mod_base = OTHER; note = 2'-O-methyl ribonucleotide
  modified_base 82: mod_base = OTHER; note = 2'-O-methyl ribonucleotide
  modified_base 83: mod_base = OTHER; note = 2'-O-methyl ribonucleotide
  modified_base 84: mod_base = OTHER; note = 2'-O-methyl ribonucleotide
  modified_base 85: mod_base = OTHER; note = 2'-O-methyl ribonucleotide
  modified_base 86: mod_base = OTHER; note = 2'-O-methyl ribonucleotide
  modified_base 87: mod_base = OTHER; note = 2'-O-methyl ribonucleotide
  modified_base 89: mod_base = OTHER; note = 2'-O-methyl ribonucleotide
  modified_base 92: mod_base = OTHER; note = 2'-O-methyl ribonucleotide
  modified_base 93: mod_base = OTHER; note = 2'-O-methyl ribonucleotide
  modified_base 94: mod_base = OTHER; note = 2'-O-methyl ribonucleotide
  modified_base 95: mod_base = OTHER; note = 2'-O-methyl ribonucleotide
  modified_base 96: mod_base = OTHER; note = 2'-O-methyl ribonucleotide
  modified_base 97: mod_base = OTHER; note = 2'-O-methyl ribonucleotide
  modified_base 98: mod_base = OTHER; note = 2'-O-methyl ribonucleotide
  modified_base 99: mod_base = OTHER; note = 2'-O-methyl ribonucleotide
  modified_base 100: mod_base = OTHER; note = 2'-O-methyl ribonucleotide
  modified_base 101: mod_base = OTHER; note = uniform ribonucleotides (A, C, G, inosine or U), deoxynucleotides (A, G, C, inosine or T), ribonebularine, 2'-O-methylnebularine or deoxynebularine
  modified_base 102: mod_base = OTHER; note = uniform ribonucleotides (A, C, G, inosine or U), deoxynucleotides (A, G, C, inosine or T), ribonebularine, 2'-O-methylnebularine or deoxynebularine
  modified_base 103: mod_base = OTHER; note = uniform ribonucleotides (A, C, G, inosine or U), deoxynucleotides (A, G, C, inosine or T), ribonebularine, 2'-O-methylnebularine or deoxynebularine
  modified_base 1..3: mod_base = OTHER; note = phosphorothioate linkage
  modified_base 97..100: mod_base = OTHER; note = phosphorothioate linkage
  misc_feature 1..100: note = RNA
  misc_feature 101..103: note = Optionally DNA or RNA

SEQ ID NO: 2894 - DNA, 103 bp, synthetic construct; identical to SEQ ID NO: 1797
  source 1..103: mol_type = other DNA
  modified_base 1: mod_base = OTHER; note = 2'-O-methyl ribonucleotide
  modified_base 2: mod_base = OTHER; note = 2'-O-methyl ribonucleotide
  modified_base 3: mod_base = OTHER; note = 2'-O-methyl ribonucleotide
  modified_base 21: mod_base = OTHER; note = 2'-O-methyl ribonucleotide
  modified_base 28: mod_base = OTHER; note = 2'-O-methyl ribonucleotide
  modified_base 29: mod_base = OTHER; note = 2'-O-methyl ribonucleotide
  modified_base 30: mod_base = OTHER; note = 2'-O-methyl ribonucleotide
  modified_base 31: mod_base = OTHER; note = 2'-O-methyl ribonucleotide
  modified_base 32: mod_base = OTHER; note = 2'-O-methyl ribonucleotide
  modified_base 34: mod_base = OTHER; note = 2'-O-methyl ribonucleotide
  modified_base 35: mod_base = OTHER; note = 2'-O-methyl ribonucleotide
  modified_base 36: mod_base = OTHER; note = 2'-O-methyl ribonucleotide
  modified_base 37: mod_base = OTHER; note = 2'-O-methyl ribonucleotide
  modified_base 38: mod_base = OTHER; note = 2'-O-methyl ribonucleotide
  modified_base 39: mod_base = OTHER; note = 2'-O-methyl ribonucleotide
  modified_base 40: mod_base = OTHER; note = 2'-O-methyl ribonucleotide
  modified_base 41: mod_base = OTHER; note = 2'-O-methyl ribonucleotide
  modified_base 42: mod_base = OTHER; note = 2'-O-methyl ribonucleotide
  modified_base 46: mod_base = OTHER; note = 2'-O-methyl ribonucleotide
  modified_base 48: mod_base = OTHER; note = 2'-O-methyl ribonucleotide
  modified_base 50: mod_base = OTHER; note = 2'-O-methyl ribonucleotide
  modified_base 52: mod_base = OTHER; note = 2'-O-methyl ribonucleotide
  modified_base 53: mod_base = OTHER; note = 2'-O-methyl ribonucleotide
  modified_base 54: mod_base = OTHER; note = 2'-O-methyl ribonucleotide
  modified_base 57: mod_base = OTHER; note = 2'-O-methyl ribonucleotide
  modified_base 61: mod_base = OTHER; note = 2'-O-methyl ribonucleotide
  modified_base 66: mod_base = OTHER; note = 2'-O-methyl ribonucleotide
  modified_base 67: mod_base = OTHER; note = 2'-O-methyl ribonucleotide
  modified_base 70: mod_base = OTHER; note = 2'-O-methyl ribonucleotide
  modified_base 71: mod_base = OTHER; note = 2'-O-methyl ribonucleotide
  modified_base 72: mod_base = OTHER; note = 2'-O-methyl ribonucleotide
  modified_base 73: mod_base = OTHER; note = 2'-O-methyl ribonucleotide
  modified_base 74: mod_base = OTHER; note = 2'-O-methyl ribonucleotide
  modified_base 75: mod_base = OTHER; note = 2'-O-methyl ribonucleotide
  modified_base 76: mod_base = OTHER; note = 2'-O-methyl ribonucleotide
  modified_base 77: mod_base = OTHER; note = 2'-O-methyl ribonucleotide
  modified_base 78: mod_base = OTHER; note = 2'-O-methyl ribonucleotide
  modified_base 79: mod_base = OTHER; note = 2'-O-methyl ribonucleotide
  modified_base 80: mod_base = OTHER; note = 2'-O-methyl ribonucleotide
  modified_base 82: mod_base = OTHER; note = 2'-O-methyl ribonucleotide
  modified_base 83: mod_base = OTHER; note = 2'-O-methyl ribonucleotide
  modified_base 84: mod_base = OTHER; note = 2'-O-methyl ribonucleotide
  modified_base 85: mod_base = OTHER; note = 2'-O-methyl ribonucleotide
  modified_base 86: mod_base = OTHER; note = 2'-O-methyl ribonucleotide
  modified_base 87: mod_base = OTHER; note = 2'-O-methyl ribonucleotide
  modified_base 89: mod_base = OTHER; note = 2'-O-methyl ribonucleotide
  modified_base 91: mod_base = OTHER; note = 2'-O-methyl ribonucleotide
  modified_base 92: mod_base = OTHER; note = 2'-O-methyl ribonucleotide
  modified_base 93: mod_base = OTHER; note = 2'-O-methyl ribonucleotide
  modified_base 94: mod_base = OTHER; note = 2'-O-methyl ribonucleotide
  modified_base 95: mod_base = OTHER; note = 2'-O-methyl ribonucleotide
  modified_base 96: mod_base = OTHER; note = 2'-O-methyl ribonucleotide
  modified_base 97: mod_base = OTHER; note = 2'-O-methyl ribonucleotide
  modified_base 98: mod_base = OTHER; note = 2'-O-methyl ribonucleotide
  modified_base 99: mod_base = OTHER; note = 2'-O-methyl ribonucleotide
  modified_base 100: mod_base = OTHER; note = 2'-O-methyl ribonucleotide
  modified_base 101: mod_base = OTHER; note = uniform ribonucleotides (A, C, G, inosine or U), deoxynucleotides (A, G, C, inosine or T), ribonebularine, 2'-O-methylnebularine or deoxynebularine
  modified_base 102: mod_base = OTHER; note = uniform ribonucleotides (A, C, G, inosine or U), deoxynucleotides (A, G, C, inosine or T), ribonebularine, 2'-O-methylnebularine or deoxynebularine
  modified_base 103: mod_base = OTHER; note = uniform ribonucleotides (A, C, G, inosine or U), deoxynucleotides (A, G, C, inosine or T), ribonebularine, 2'-O-methylnebularine or deoxynebularine
  modified_base 1..3: mod_base = OTHER; note = phosphorothioate linkage
  modified_base 97..100: mod_base = OTHER; note = phosphorothioate linkage
  misc_feature 1..100: note = RNA
  misc_feature 101..103: note = Optionally DNA or RNA

SEQ ID NO: 2895 - DNA, 103 bp, synthetic construct; identical to SEQ ID NO: 1797
  source 1..103: mol_type = other DNA
  modified_base 1: mod_base = OTHER; note = 2'-O-methyl ribonucleotide
  modified_base 2: mod_base = OTHER; note = 2'-O-methyl ribonucleotide
  modified_base 3: mod_base = OTHER; note = 2'-O-methyl ribonucleotide
  modified_base 21: mod_base = OTHER; note = 2'-O-methyl ribonucleotide
  modified_base 28: mod_base = OTHER; note = 2'-O-methyl ribonucleotide
  modified_base 29: mod_base = OTHER; note = 2'-O-methyl ribonucleotide
  modified_base 30: mod_base = OTHER; note = 2'-O-methyl ribonucleotide
  modified_base 31: mod_base = OTHER; note = 2'-O-methyl ribonucleotide
  modified_base 32: mod_base = OTHER; note = 2'-O-methyl ribonucleotide
  modified_base 34: mod_base = OTHER; note = 2'-O-methyl ribonucleotide
  modified_base 35: mod_base = OTHER; note = 2'-O-methyl ribonucleotide
  modified_base 36: mod_base = OTHER; note = 2'-O-methyl ribonucleotide
  modified_base 37: mod_base = OTHER; note = 2'-O-methyl ribonucleotide
  modified_base 38: mod_base = OTHER; note = 2'-O-methyl ribonucleotide
  modified_base 39: mod_base = OTHER; note = 2'-O-methyl ribonucleotide
  modified_base 40: mod_base = OTHER; note = 2'-O-methyl ribonucleotide
  modified_base 41: mod_base = OTHER; note = 2'-O-methyl ribonucleotide
  modified_base 42: mod_base = OTHER; note = 2'-O-methyl ribonucleotide
  modified_base 46: mod_base = OTHER; note = 2'-O-methyl ribonucleotide
  modified_base 48: mod_base = OTHER; note = 2'-O-methyl ribonucleotide
  modified_base 50: mod_base = OTHER; note = 2'-O-methyl ribonucleotide
  modified_base 52: mod_base = OTHER; note = 2'-O-methyl ribonucleotide
  modified_base 53: mod_base = OTHER; note = 2'-O-methyl ribonucleotide
  modified_base 54: mod_base = OTHER; note = 2'-O-methyl ribonucleotide
  modified_base 55: mod_base = OTHER; note = 2'-O-methyl ribonucleotide
  modified_base 56: mod_base = OTHER; note = 2'-O-methyl ribonucleotide
  modified_base 57: mod_base = OTHER; note = 2'-O-methyl ribonucleotide
  modified_base 60: mod_base = OTHER; note = 2'-O-methyl ribonucleotide
  modified_base 61: mod_base = OTHER; note = 2'-O-methyl ribonucleotide
  modified_base 66: mod_base = OTHER; note = 2'-O-methyl ribonucleotide
  modified_base 67: mod_base = OTHER; note = 2'-O-methyl ribonucleotide
  modified_base 70: mod_base = OTHER; note = 2'-O-methyl ribonucleotide
  modified_base 71: mod_base = OTHER; note = 2'-O-methyl ribonucleotide
  modified_base 72: mod_base = OTHER; note = 2'-O-methyl ribonucleotide
  modified_base 74: mod_base = OTHER; note = 2'-O-methyl ribonucleotide
  modified_base 75: mod_base = OTHER; note = 2'-O-methyl ribonucleotide
  modified_base 76: mod_base = OTHER; note = 2'-O-methyl ribonucleotide
  modified_base 77: mod_base = OTHER; note = 2'-O-methyl ribonucleotide
  modified_base 78: mod_base = OTHER; note = 2'-O-methyl ribonucleotide
  modified_base 79: mod_base = OTHER; note = 2'-O-methyl ribonucleotide
  modified_base 80: mod_base = OTHER; note = 2'-O-methyl ribonucleotide
  modified_base 82: mod_base = OTHER; note = 2'-O-methyl ribonucleotide
  modified_base 83: mod_base = OTHER; note = 2'-O-methyl ribonucleotide
  modified_base 84: mod_base = OTHER; note = 2'-O-methyl ribonucleotide
  modified_base 85: mod_base = OTHER; note = 2'-O-methyl ribonucleotide
  modified_base 86: mod_base = OTHER; note = 2'-O-methyl ribonucleotide
  modified_base 87: mod_base = OTHER; note = 2'-O-methyl ribonucleotide
  modified_base 89: mod_base = OTHER; note = 2'-O-methyl ribonucleotide
  modified_base 92: mod_base = OTHER; note = 2'-O-methyl ribonucleotide
  modified_base 93: mod_base = OTHER; note = 2'-O-methyl ribonucleotide
  modified_base 94: mod_base = OTHER; note = 2'-O-methyl ribonucleotide
  modified_base 95: mod_base = OTHER; note = 2'-O-methyl ribonucleotide
  modified_base 96: mod_base = OTHER; note = 2'-O-methyl ribonucleotide
  modified_base 97: mod_base = OTHER; note = 2'-O-methyl ribonucleotide
  modified_base 98: mod_base = OTHER; note = 2'-O-methyl ribonucleotide
  modified_base 99: mod_base = OTHER; note = 2'-O-methyl ribonucleotide
  modified_base 100: mod_base = OTHER; note = 2'-O-methyl ribonucleotide
  modified_base 101: mod_base = OTHER; note = uniform ribonucleotides (A, C, G, inosine or U), deoxynucleotides (A, G, C, inosine or T), ribonebularine, 2'-O-methylnebularine or deoxynebularine
  modified_base 102: mod_base = OTHER; note = uniform ribonucleotides (A, C, G, inosine or U), deoxynucleotides (A, G, C, inosine or T), ribonebularine, 2'-O-methylnebularine or deoxynebularine
  modified_base 103: mod_base = OTHER; note = uniform ribonucleotides (A, C, G, inosine or U), deoxynucleotides (A, G, C, inosine or T), ribonebularine, 2'-O-methylnebularine or deoxynebularine
  modified_base 1..3: mod_base = OTHER; note = phosphorothioate linkage
  modified_base 97..100: mod_base = OTHER; note = phosphorothioate linkage
  misc_feature 1..100: note = RNA
  misc_feature 101..103: note = Optionally DNA or RNA

SEQ ID NO: 2896 - DNA, 103 bp, synthetic construct; identical to SEQ ID NO: 1795
  source 1..103: mol_type = other DNA
  modified_base 1: mod_base = OTHER; note = 2'-O-methyl ribonucleotide
  modified_base 2: mod_base = OTHER; note = 2'-O-methyl ribonucleotide
  modified_base 3: mod_base = OTHER; note = 2'-O-methyl ribonucleotide
  modified_base 21: mod_base = OTHER; note = 2'-O-methyl ribonucleotide
  modified_base 28: mod_base = OTHER; note = 2'-O-methyl ribonucleotide
  modified_base 29: mod_base = OTHER; note = 2'-O-methyl ribonucleotide
  modified_base 30: mod_base = OTHER; note = 2'-O-methyl ribonucleotide
  modified_base 31: mod_base = OTHER; note = 2'-O-methyl ribonucleotide
  modified_base 32: mod_base = OTHER; note = 2'-O-methyl ribonucleotide
  modified_base 33: mod_base = OTHER; note = 2'-O-methyl ribonucleotide
  modified_base 34: mod_base = OTHER; note = 2'-O-methyl ribonucleotide
  modified_base 35: mod_base = OTHER; note = 2'-O-methyl ribonucleotide
  modified_base 36: mod_base = OTHER; note = 2'-O-methyl ribonucleotide
  modified_base 37: mod_base = OTHER; note = 2'-O-methyl ribonucleotide
  modified_base 38: mod_base = OTHER; note = 2'-O-methyl ribonucleotide
  modified_base 39: mod_base = OTHER; note = 2'-O-methyl ribonucleotide
  modified_base 40: mod_base = OTHER; note = 2'-O-methyl ribonucleotide
  modified_base 41: mod_base = OTHER; note = 2'-O-methyl ribonucleotide
  modified_base 42: mod_base = OTHER; note = 2'-O-methyl ribonucleotide
  modified_base 46: mod_base = OTHER; note = 2'-O-methyl ribonucleotide
  modified_base 48: mod_base = OTHER; note = 2'-O-methyl ribonucleotide
  modified_base 50: mod_base = OTHER; note = 2'-O-methyl ribonucleotide
  modified_base 52: mod_base = OTHER; note = 2'-O-methyl ribonucleotide
  modified_base 53: mod_base = OTHER; note = 2'-O-methyl ribonucleotide
  modified_base 54: mod_base = OTHER; note = 2'-O-methyl ribonucleotide
  modified_base 55: mod_base = OTHER; note = 2'-O-methyl ribonucleotide
  modified_base 56: mod_base = OTHER; note = 2'-O-methyl ribonucleotide
  modified_base 57: mod_base = OTHER; note = 2'-O-methyl ribonucleotide
  modified_base 60: mod_base = OTHER; note = 2'-O-methyl ribonucleotide
  modified_base 61: mod_base = OTHER; note = 2'-O-methyl ribonucleotide
  modified_base 66: mod_base = OTHER; note = 2'-O-methyl ribonucleotide
  modified_base 67: mod_base = OTHER; note = 2'-O-methyl ribonucleotide
  modified_base 70: mod_base = OTHER; note = 2'-O-methyl ribonucleotide
  modified_base 71: mod_base = OTHER; note = 2'-O-methyl ribonucleotide
  modified_base 72: mod_base = OTHER; note = 2'-O-methyl ribonucleotide
  modified_base 73: mod_base = OTHER; note = 2'-O-methyl ribonucleotide
  modified_base 74: mod_base = OTHER; note = 2'-O-methyl ribonucleotide
  modified_base 75: mod_base = OTHER; note = 2'-O-methyl ribonucleotide
  modified_base 76: mod_base = OTHER; note = 2'-O-methyl ribonucleotide
  modified_base 77: mod_base = OTHER; note = 2'-O-methyl ribonucleotide
  modified_base 78: mod_base = OTHER; note = 2'-O-methyl ribonucleotide
  modified_base 79: mod_base = OTHER; note = 2'-O-methyl ribonucleotide
  modified_base 80: mod_base = OTHER; note = 2'-O-methyl ribonucleotide
  modified_base 81: mod_base = OTHER; note = 2'-O-methyl ribonucleotide
  modified_base 83: mod_base = OTHER; note = 2'-O-methyl ribonucleotide
  modified_base 84: mod_base = OTHER; note = 2'-O-methyl ribonucleotide
  modified_base 85: mod_base = OTHER; note = 2'-O-methyl ribonucleotide
  modified_base 86: mod_base = OTHER; note = 2'-O-methyl ribonucleotide
  modified_base 87: mod_base = OTHER; note = 2'-O-methyl ribonucleotide
  modified_base 88: mod_base = OTHER; note = 2'-O-methyl ribonucleotide
  modified_base 89: mod_base = OTHER; note = 2'-O-methyl ribonucleotide
  modified_base 90: mod_base = OTHER; note = 2'-O-methyl ribonucleotide
  modified_base 91: mod_base = OTHER; note = 2'-O-methyl ribonucleotide
  modified_base 92: mod_base = OTHER; note = 2'-O-methyl ribonucleotide
  modified_base 93: mod_base = OTHER; note = 2'-O-methyl ribonucleotide
  modified_base 94: mod_base = OTHER; note = 2'-O-methyl ribonucleotide
  modified_base 95: mod_base = OTHER; note = 2'-O-methyl ribonucleotide
  modified_base 96: mod_base = OTHER; note = 2'-O-methyl ribonucleotide
  modified_base 97: mod_base = OTHER; note = 2'-O-methyl ribonucleotide
  modified_base 98: mod_base = OTHER; note = 2'-O-methyl ribonucleotide
  modified_base 99: mod_base = OTHER; note = 2'-O-methyl ribonucleotide
  modified_base 100: mod_base = OTHER; note = 2'-O-methyl ribonucleotide
  modified_base 101: mod_base = OTHER; note = uniform ribonucleotides (A, C, G, inosine or U), deoxynucleotides (A, G, C, inosine or T), ribonebularine, 2'-O-methylnebularine or deoxynebularine
  modified_base 102: mod_base = OTHER; note = uniform ribonucleotides (A, C, G, inosine or U), deoxynucleotides (A, G, C, inosine or T), ribonebularine, 2'-O-methylnebularine or deoxynebularine
  modified_base 103: mod_base = OTHER; note = uniform ribonucleotides (A, C, G, inosine or U), deoxynucleotides (A, G, C, inosine or T), ribonebularine, 2'-O-methylnebularine or deoxynebularine
  modified_base 1..3: mod_base = OTHER; note = phosphorothioate linkage
  modified_base 97..100: mod_base = OTHER; note = phosphorothioate linkage
  misc_feature 1..100: note = RNA
  misc_feature 101..103: note = Optionally DNA or RNA

SEQ ID NO: 2897 - DNA, 103 bp, synthetic construct; identical to SEQ ID NO: 1795
  source 1..103: mol_type = other DNA
  modified_base 1: mod_base = OTHER; note = 2'-O-methyl ribonucleotide
  modified_base 2: mod_base = OTHER; note = 2'-O-methyl ribonucleotide
  modified_base 3: mod_base = OTHER; note = 2'-O-methyl ribonucleotide
  modified_base 21: mod_base = OTHER; note = 2'-O-methyl ribonucleotide
  modified_base 28: mod_base = OTHER; note = 2'-O-methyl ribonucleotide
  modified_base 29: mod_base = OTHER; note = 2'-O-methyl ribonucleotide
  modified_base 30: mod_base = OTHER; note = 2'-O-methyl ribonucleotide
  modified_base 31: mod_base = OTHER; note = 2'-O-methyl ribonucleotide
  modified_base 32: mod_base = OTHER; note = 2'-O-methyl ribonucleotide
  modified_base 34: mod_base = OTHER; note = 2'-O-methyl ribonucleotide
  modified_base 35: mod_base = OTHER; note = 2'-O-methyl ribonucleotide
  modified_base 36: mod_base = OTHER; note = 2'-O-methyl ribonucleotide
  modified_base 37: mod_base = OTHER; note = 2'-O-methyl ribonucleotide
  modified_base 38: mod_base = OTHER; note = 2'-O-methyl ribonucleotide
  modified_base 39: mod_base = OTHER; note = 2'-O-methyl ribonucleotide
  modified_base 40: mod_base = OTHER; note = 2'-O-methyl ribonucleotide
  modified_base 41: mod_base = OTHER; note = 2'-O-methyl ribonucleotide
  modified_base 42: mod_base = OTHER; note = 2'-O-methyl ribonucleotide
  modified_base 46: mod_base = OTHER; note = 2'-O-methyl ribonucleotide
  modified_base 48: mod_base = OTHER; note = 2'-O-methyl ribonucleotide
  modified_base 50: mod_base = OTHER; note = 2'-O-methyl ribonucleotide
  modified_base 52: mod_base = OTHER; note = 2'-O-methyl ribonucleotide
  modified_base 53: mod_base = OTHER; note = 2'-O-methyl ribonucleotide
  modified_base 54: mod_base = OTHER; note = 2'-O-methyl ribonucleotide
  modified_base 55: mod_base = OTHER; note = 2'-O-methyl ribonucleotide
  modified_base 56: mod_base = OTHER; note = 2'-O-methyl ribonucleotide
  modified_base 57: mod_base = OTHER; note = 2'-O-methyl ribonucleotide
  modified_base 60: mod_base = OTHER; note = 2'-O-methyl ribonucleotide
  modified_base 61: mod_base = OTHER; note = 2'-O-methyl ribonucleotide
  modified_base 66: mod_base = OTHER; note = 2'-O-methyl ribonucleotide
  modified_base 67: mod_base = OTHER; note = 2'-O-methyl ribonucleotide
  modified_base 70: mod_base = OTHER; note = 2'-O-methyl ribonucleotide
  modified_base 71: mod_base = OTHER; note = 2'-O-methyl ribonucleotide
  modified_base 72: mod_base = OTHER; note = 2'-O-methyl ribonucleotide
  modified_base 74: mod_base = OTHER; note = 2'-O-methyl ribonucleotide
  modified_base 75: mod_base = OTHER; note = 2'-O-methyl ribonucleotide
  modified_base 76: mod_base = OTHER; note = 2'-O-methyl ribonucleotide
  modified_base 77: mod_base = OTHER; note = 2'-O-methyl ribonucleotide
  modified_base 78: mod_base = OTHER; note = 2'-O-methyl ribonucleotide
  modified_base 79: mod_base = OTHER; note = 2'-O-methyl ribonucleotide
  modified_base 80: mod_base = OTHER; note = 2'-O-methyl ribonucleotide
  modified_base 81: mod_base = OTHER; note = 2'-O-methyl ribonucleotide
  modified_base 83: mod_base = OTHER; note = 2'-O-methyl ribonucleotide
  modified_base 84: mod_base = OTHER; note = 2'-O-methyl ribonucleotide
  modified_base 85: mod_base = OTHER; note = 2'-O-methyl ribonucleotide
  modified_base 86: mod_base = OTHER; note = 2'-O-methyl ribonucleotide
  modified_base 87: mod_base = OTHER; note = 2'-O-methyl ribonucleotide
  modified_base 88: mod_base = OTHER; note = 2'-O-methyl ribonucleotide
  modified_base 89: mod_base = OTHER; note = 2'-O-methyl ribonucleotide
  modified_base 90: mod_base = OTHER; note = 2'-O-methyl ribonucleotide
  modified_base 91: mod_base = OTHER; note = 2'-O-methyl ribonucleotide
  modified_base 92: mod_base = OTHER; note = 2'-O-methyl ribonucleotide
  modified_base 93: mod_base = OTHER; note = 2'-O-methyl ribonucleotide
  modified_base 94: mod_base = OTHER; note = 2'-O-methyl ribonucleotide
  modified_base 95: mod_base = OTHER; note = 2'-O-methyl ribonucleotide
  modified_base 96: mod_base = OTHER; note = 2'-O-methyl ribonucleotide
  modified_base 97: mod_base = OTHER; note = 2'-O-methyl ribonucleotide
  modified_base 98: mod_base = OTHER; note = 2'-O-methyl ribonucleotide
  modified_base 99: mod_base = OTHER; note = 2'-O-methyl ribonucleotide
  modified_base 100: mod_base = OTHER; note = 2'-O-methyl ribonucleotide
  modified_base 101: mod_base = OTHER; note = uniform ribonucleotides (A, C, G, inosine or U), deoxynucleotides (A, G, C, inosine or T), ribonebularine, 2'-O-methylnebularine or deoxynebularine
  modified_base 102: mod_base = OTHER; note = uniform ribonucleotides (A, C, G, inosine or U), deoxynucleotides (A, G, C, inosine or T), ribonebularine, 2'-O-methylnebularine or deoxynebularine
  modified_base 103: mod_base = OTHER; note = uniform ribonucleotides (A, C, G, inosine or U), deoxynucleotides (A, G, C, inosine or T), ribonebularine, 2'-O-methylnebularine or deoxynebularine
  modified_base 1..3: mod_base = OTHER; note = phosphorothioate linkage
  modified_base 97..100: mod_base = OTHER; note = phosphorothioate linkage
  misc_feature 1..100: note = RNA
  misc_feature 101..103: note = Optionally DNA or RNA

SEQ ID NO: 2898 - DNA, 103 bp, synthetic construct; identical to SEQ ID NO: 1796
  source 1..103: mol_type = other DNA
  modified_base 1: mod_base = OTHER; note = 2'-O-methyl ribonucleotide
  modified_base 2: mod_base = OTHER; note = 2'-O-methyl ribonucleotide
  modified_base 3: mod_base = OTHER; note = 2'-O-methyl ribonucleotide
  modified_base 21: mod_base = OTHER; note = 2'-O-methyl ribonucleotide
  modified_base 28: mod_base = OTHER; note = 2'-O-methyl ribonucleotide
  modified_base 29: mod_base = OTHER; note = 2'-O-methyl ribonucleotide
  modified_base 30: mod_base = OTHER; note = 2'-O-methyl ribonucleotide
  modified_base 31: mod_base = OTHER; note = 2'-O-methyl ribonucleotide
  modified_base 32: mod_base = OTHER; note = 2'-O-methyl ribonucleotide
  modified_base 33: mod_base = OTHER; note = 2'-O-methyl ribonucleotide
  modified_base 34: mod_base = OTHER; note = 2'-O-methyl ribonucleotide
  modified_base 35: mod_base = OTHER; note = 2'-O-methyl ribonucleotide
  modified_base 36: mod_base = OTHER; note = 2'-O-methyl ribonucleotide
  modified_base 37: mod_base = OTHER; note = 2'-O-methyl ribonucleotide
  modified_base 38: mod_base = OTHER; note = 2'-O-methyl ribonucleotide
  modified_base 39: mod_base = OTHER; note = 2'-O-methyl ribonucleotide
  modified_base 40: mod_base = OTHER; note = 2'-O-methyl ribonucleotide
  modified_base 41: mod_base = OTHER; note = 2'-O-methyl ribonucleotide
  modified_base 42: mod_base = OTHER; note = 2'-O-methyl ribonucleotide
  modified_base 46: mod_base = OTHER; note = 2'-O-methyl ribonucleotide
  modified_base 48: mod_base = OTHER; note = 2'-O-methyl ribonucleotide
  modified_base 50: mod_base = OTHER; note = 2'-O-methyl ribonucleotide
  modified_base 52: mod_base = OTHER; note = 2'-O-methyl ribonucleotide
  modified_base 53: mod_base = OTHER; note = 2'-O-methyl ribonucleotide
  modified_base 54: mod_base = OTHER; note = 2'-O-methyl ribonucleotide
  modified_base 55: mod_base = OTHER; note = 2'-O-methyl ribonucleotide
  modified_base 56: mod_base = OTHER; note = 2'-O-methyl ribonucleotide
  modified_base 57: mod_base = OTHER; note = 2'-O-methyl ribonucleotide
  modified_base 60: mod_base = OTHER; note = 2'-O-methyl ribonucleotide
  modified_base 61: mod_base = OTHER; note = 2'-O-methyl ribonucleotide
  modified_base 66: mod_base = OTHER; note = 2'-O-methyl ribonucleotide
  modified_base 67: mod_base = OTHER; note = 2'-O-methyl ribonucleotide
  modified_base 70: mod_base = OTHER; note = 2'-O-methyl ribonucleotide
  modified_base 71: mod_base = OTHER; note = 2'-O-methyl ribonucleotide
  modified_base 72: mod_base = OTHER; note = 2'-O-methyl ribonucleotide
  modified_base 73: mod_base = OTHER; note = 2'-O-methyl ribonucleotide
  modified_base 74: mod_base = OTHER; note = 2'-O-methyl ribonucleotide
  modified_base 75: mod_base = OTHER; note = 2'-O-methyl ribonucleotide
  modified_base 76: mod_base = OTHER; note = 2'-O-methyl ribonucleotide
  modified_base 77: mod_base = OTHER; note = 2'-O-methyl ribonucleotide
  modified_base 78: mod_base = OTHER; note = 2'-O-methyl ribonucleotide
  modified_base 79: mod_base = OTHER; note = 2'-O-methyl ribonucleotide
  modified_base 80: mod_base = OTHER; note = 2'-O-methyl ribonucleotide
  modified_base 81: mod_base = OTHER; note = 2'-O-methyl ribonucleotide
  modified_base 83: mod_base = OTHER; note = 2'-O-methyl ribonucleotide
  modified_base 84: mod_base = OTHER; note = 2'-O-methyl ribonucleotide
  modified_base 85: mod_base = OTHER; note = 2'-O-methyl ribonucleotide
  modified_base 86: mod_base = OTHER; note = 2'-O-methyl ribonucleotide
  modified_base 87: mod_base = OTHER; note = 2'-O-methyl ribonucleotide
  modified_base 88: mod_base = OTHER; note = 2'-O-methyl ribonucleotide
  modified_base 89: mod_base = OTHER; note = 2'-O-methyl ribonucleotide
  modified_base 90: mod_base = OTHER; note = 2'-O-methyl ribonucleotide
  modified_base 91: mod_base = OTHER; note = 2'-O-methyl ribonucleotide
  modified_base 92: mod_base = OTHER; note = 2'-O-methyl ribonucleotide
  modified_base 93: mod_base = OTHER; note = 2'-O-methyl ribonucleotide
  modified_base 94: mod_base = OTHER; note = 2'-O-methyl ribonucleotide
  modified_base 95: mod_base = OTHER; note = 2'-O-methyl ribonucleotide
  modified_base 96: mod_base = OTHER; note = 2'-O-methyl ribonucleotide
  modified_base 97: mod_base = OTHER; note = 2'-O-methyl ribonucleotide
  modified_base 98: mod_base = OTHER; note = 2'-O-methyl ribonucleotide
  modified_base 99: mod_base = OTHER; note = 2'-O-methyl ribonucleotide
  modified_base 100: mod_base = OTHER; note = 2'-O-methyl ribonucleotide
  modified_base 101: mod_base = OTHER; note = uniform ribonucleotides (A, C, G, inosine or U), deoxynucleotides (A, G, C, inosine or T), ribonebularine, 2'-O-methylnebularine or deoxynebularine
  modified_base 102: mod_base = OTHER; note = uniform ribonucleotides (A, C, G, inosine or U), deoxynucleotides (A, G, C, inosine or T), ribonebularine, 2'-O-methylnebularine or deoxynebularine
  modified_base 103: mod_base = OTHER; note = uniform ribonucleotides (A, C, G, inosine or U), deoxynucleotides (A, G, C, inosine or T), ribonebularine, 2'-O-methylnebularine or deoxynebularine
  modified_base 1..3: mod_base = OTHER; note = phosphorothioate linkage
  modified_base 97..100: mod_base = OTHER; note = phosphorothioate linkage
  misc_feature 1..100: note = RNA
  misc_feature 101..103: note = Optionally DNA or RNA

SEQ ID NO: 2899 - DNA, 103 bp, synthetic construct; identical to SEQ ID NO: 1796
  source 1..103: mol_type = other DNA
  modified_base 1: mod_base = OTHER; note = 2'-O-methyl ribonucleotide
  modified_base 2: mod_base = OTHER; note = 2'-O-methyl ribonucleotide
  modified_base 3: mod_base = OTHER; note = 2'-O-methyl ribonucleotide
  modified_base 21: mod_base = OTHER; note = 2'-O-methyl ribonucleotide
  modified_base 28: mod_base = OTHER; note = 2'-O-methyl ribonucleotide
  modified_base 29: mod_base = OTHER; note = 2'-O-methyl ribonucleotide
  modified_base 30: mod_base = OTHER; note = 2'-O-methyl ribonucleotide
  modified_base 31: mod_base = OTHER; note = 2'-O-methyl ribonucleotide
  modified_base 32: mod_base = OTHER; note = 2'-O-methyl ribonucleotide
  modified_base 34: mod_base = OTHER; note = 2'-O-methyl ribonucleotide
  modified_base 35: mod_base = OTHER; note = 2'-O-methyl ribonucleotide
  modified_base 36: mod_base = OTHER; note = 2'-O-methyl ribonucleotide
  modified_base 37: mod_base = OTHER; note = 2'-O-methyl ribonucleotide
  modified_base 38: mod_base = OTHER; note = 2'-O-methyl ribonucleotide
  modified_base 39: mod_base = OTHER; note = 2'-O-methyl ribonucleotide
  modified_base 40: mod_base = OTHER; note = 2'-O-methyl ribonucleotide
  modified_base 41: mod_base = OTHER; note = 2'-O-methyl ribonucleotide
  modified_base 42: mod_base = OTHER; note = 2'-O-methyl ribonucleotide
  modified_base 46: mod_base = OTHER; note = 2'-O-methyl ribonucleotide
  modified_base 48: mod_base = OTHER; note = 2'-O-methyl ribonucleotide
  modified_base 50: mod_base = OTHER; note = 2'-O-methyl ribonucleotide
  modified_base 52: mod_base = OTHER; note = 2'-O-methyl ribonucleotide
  modified_base 53: mod_base = OTHER; note = 2'-O-methyl ribonucleotide
  modified_base 54: mod_base = OTHER; note = 2'-O-methyl ribonucleotide
  modified_base 55: mod_base = OTHER; note = 2'-O-methyl ribonucleotide
  modified_base 56: mod_base = OTHER; note = 2'-O-methyl ribonucleotide
  modified_base 57: mod_base = OTHER; note = 2'-O-methyl ribonucleotide
  modified_base 60: mod_base = OTHER; note = 2'-O-methyl ribonucleotide
  modified_base 61: mod_base = OTHER; note = 2'-O-methyl ribonucleotide
  modified_base 66: mod_base = OTHER; note = 2'-O-methyl ribonucleotide
  modified_base 67: mod_base = OTHER; note = 2'-O-methyl ribonucleotide
  modified_base 70: mod_base = OTHER; note = 2'-O-methyl ribonucleotide
  modified_base 71: mod_base = OTHER; note = 2'-O-methyl ribonucleotide
  modified_base 72: mod_base = OTHER; note = 2'-O-methyl ribonucleotide
  modified_base 74: mod_base = OTHER; note = 2'-O-methyl ribonucleotide
  modified_base 75: mod_base = OTHER; note = 2'-O-methyl ribonucleotide
  modified_base 76: mod_base = OTHER; note = 2'-O-methyl ribonucleotide
  modified_base 77: mod_base = OTHER; note = 2'-O-methyl ribonucleotide
  modified_base 78: mod_base = OTHER; note = 2'-O-methyl ribonucleotide
  modified_base 79: mod_base = OTHER; note = 2'-O-methyl ribonucleotide
  modified_base 80: mod_base = OTHER; note = 2'-O-methyl ribonucleotide
  modified_base 81: mod_base = OTHER; note = 2'-O-methyl ribonucleotide
  modified_base 83: mod_base = OTHER; note = 2'-O-methyl ribonucleotide
  modified_base 84: mod_base = OTHER; note = 2'-O-methyl ribonucleotide
  modified_base 85: mod_base = OTHER; note = 2'-O-methyl ribonucleotide
  modified_base 86: mod_base = OTHER; note = 2'-O-methyl ribonucleotide
  modified_base 87: mod_base = OTHER; note = 2'-O-methyl ribonucleotide
  modified_base 88: mod_base = OTHER; note = 2'-O-methyl ribonucleotide
  modified_base 89: mod_base = OTHER; note = 2'-O-methyl ribonucleotide
  modified_base 90: mod_base = OTHER; note = 2'-O-methyl ribonucleotide
  modified_base 91: mod_base = OTHER; note = 2'-O-methyl ribonucleotide
  modified_base 92: mod_base = OTHER; note = 2'-O-methyl ribonucleotide
  modified_base 93: mod_base = OTHER; note = 2'-O-methyl ribonucleotide
  modified_base 94: mod_base = OTHER; note = 2'-O-methyl ribonucleotide
  modified_base 95: mod_base = OTHER; note = 2'-O-methyl ribonucleotide
  modified_base 96: mod_base = OTHER; note = 2'-O-methyl ribonucleotide
  modified_base 97: mod_base = OTHER; note = 2'-O-methyl ribonucleotide
  modified_base 98: mod_base = OTHER; note = 2'-O-methyl ribonucleotide
  modified_base 99: mod_base = OTHER; note = 2'-O-methyl ribonucleotide
  modified_base 100: mod_base = OTHER; note = 2'-O-methyl ribonucleotide
  modified_base 101: mod_base = OTHER; note = uniform ribonucleotides (A, C, G, inosine or U), deoxynucleotides (A, G, C, inosine or T), ribonebularine, 2'-O-methylnebularine or deoxynebularine
  modified_base 102: mod_base = OTHER; note = uniform ribonucleotides (A, C, G, inosine or U), deoxynucleotides (A, G, C, inosine or T), ribonebularine, 2'-O-methylnebularine or deoxynebularine
  modified_base 103: mod_base = OTHER; note = uniform ribonucleotides (A, C, G, inosine or U), deoxynucleotides (A, G, C, inosine or T), ribonebularine, 2'-O-methylnebularine or deoxynebularine
  modified_base 1..3: mod_base = OTHER; note = phosphorothioate linkage
  modified_base 97..100: mod_base = OTHER; note = phosphorothioate linkage
  misc_feature 1..100: note = RNA
  misc_feature 101..103: note = Optionally DNA or RNA

SEQ ID NO: 2900 - DNA, 103 bp, synthetic construct; identical to SEQ ID NO: 1795
  source 1..103: mol_type = other DNA
  modified_base 1: mod_base = OTHER; note = 2'-O-methyl ribonucleotide
  modified_base 2: mod_base = OTHER; note = 2'-O-methyl ribonucleotide
  modified_base 3: mod_base = OTHER; note = 2'-O-methyl ribonucleotide
  modified_base 21: mod_base = OTHER; note = 2'-O-methyl ribonucleotide
  modified_base 28: mod_base = OTHER; note = 2'-O-methyl ribonucleotide
  modified_base 29: mod_base = OTHER; note = 2'-O-methyl ribonucleotide
  modified_base 30: mod_base = OTHER; note = 2'-O-methyl ribonucleotide
  modified_base 31: mod_base = OTHER; note = 2'-O-methyl ribonucleotide
  modified_base 32: mod_base = OTHER; note = 2'-O-methyl ribonucleotide
  modified_base 33: mod_base = OTHER; note = 2'-O-methyl ribonucleotide
  modified_base 34: mod_base = OTHER; note = 2'-O-methyl ribonucleotide
  modified_base 35: mod_base = OTHER; note = 2'-O-methyl ribonucleotide
  modified_base 36: mod_base = OTHER; note = 2'-O-methyl ribonucleotide
  modified_base 37: mod_base = OTHER; note = 2'-O-methyl ribonucleotide
  modified_base 38: mod_base = OTHER; note = 2'-O-methyl ribonucleotide
  modified_base 39: mod_base = OTHER; note = 2'-O-methyl ribonucleotide
  modified_base 40: mod_base = OTHER; note = 2'-O-methyl ribonucleotide
  modified_base 41: mod_base = OTHER; note = 2'-O-methyl ribonucleotide
  modified_base 42: mod_base = OTHER; note = 2'-O-methyl ribonucleotide
  modified_base 46: mod_base = OTHER; note = 2'-O-methyl ribonucleotide
  modified_base 48: mod_base = OTHER; note = 2'-O-methyl ribonucleotide
  modified_base 50: mod_base = OTHER; note = 2'-O-methyl ribonucleotide
  modified_base 52: mod_base = OTHER; note = 2'-O-methyl ribonucleotide
  modified_base 53: mod_base = OTHER; note = 2'-O-methyl ribonucleotide
  modified_base 54: mod_base = OTHER; note = 2'-O-methyl ribonucleotide
  modified_base 55: mod_base = OTHER; note = 2'-O-methyl ribonucleotide
  modified_base 56: mod_base = OTHER; note = 2'-O-methyl ribonucleotide
  modified_base 57: mod_base = OTHER; note = 2'-O-methyl ribonucleotide
  modified_base 60: mod_base = OTHER; note = 2'-O-methyl ribonucleotide
  modified_base 61: mod_base = OTHER; note = 2'-O-methyl ribonucleotide
  modified_base 66: mod_base = OTHER; note = 2'-O-methyl ribonucleotide
  modified_base 67: mod_base = OTHER; note = 2'-O-methyl ribonucleotide
  modified_base 70: mod_base = OTHER; note = 2'-O-methyl ribonucleotide
  modified_base 71: mod_base = OTHER; note = 2'-O-methyl ribonucleotide
  modified_base 72: mod_base = OTHER; note = 2'-O-methyl ribonucleotide
  modified_base 73: mod_base = OTHER; note = 2'-O-methyl ribonucleotide
  modified_base 74: mod_base = OTHER; note = 2'-O-methyl ribonucleotide
  modified_base 75: mod_base = OTHER; note = 2'-O-methyl ribonucleotide
  modified_base 76: mod_base = OTHER; note = 2'-O-methyl ribonucleotide
  modified_base 77: mod_base = OTHER; note = 2'-O-methyl ribonucleotide
  modified_base 78: mod_base = OTHER; note = 2'-O-methyl ribonucleotide
  modified_base 79: mod_base = OTHER; note = 2'-O-methyl ribonucleotide
  modified_base 80: mod_base = OTHER; note = 2'-O-methyl ribonucleotide
  modified_base 81: mod_base = OTHER; note = 2'-O-methyl ribonucleotide
  modified_base 83: mod_base = OTHER; note = 2'-O-methyl ribonucleotide
  modified_base 84: mod_base = OTHER; note = 2'-O-methyl ribonucleotide
  modified_base 85: mod_base = OTHER; note = 2'-O-methyl ribonucleotide
  modified_base 86: mod_base = OTHER; note = 2'-O-methyl ribonucleotide
  modified_base 87: mod_base = OTHER; note = 2'-O-methyl ribonucleotide
  modified_base 88: mod_base = OTHER; note = 2'-O-methyl ribonucleotide
  modified_base 89: mod_base = OTHER; note = 2'-O-methyl ribonucleotide
  modified_base 90: mod_base = OTHER; note = 2'-O-methyl ribonucleotide
  modified_base 91: mod_base = OTHER; note = 2'-O-methyl ribonucleotide
  modified_base 92: mod_base = OTHER; note = 2'-O-methyl ribonucleotide
  modified_base 93: mod_base = OTHER; note = 2'-O-methyl ribonucleotide
  modified_base 94: mod_base = OTHER; note = 2'-O-methyl ribonucleotide
  modified_base 95: mod_base = OTHER; note = 2'-O-methyl ribonucleotide
  modified_base 96: mod_base = OTHER; note = 2'-O-methyl ribonucleotide
  modified_base 97: mod_base = OTHER; note = 2'-O-methyl ribonucleotide
  modified_base 98: mod_base = OTHER; note = 2'-O-methyl ribonucleotide
  modified_base 99: mod_base = OTHER; note = 2'-O-methyl ribonucleotide
  modified_base 100: mod_base = OTHER; note = 2'-O-methyl ribonucleotide
  modified_base 101: mod_base = OTHER; note = uniform ribonucleotides (A, C, G, inosine or U), deoxynucleotides (A, G, C, inosine or T), ribonebularine, 2'-O-methylnebularine or deoxynebularine
  modified_base 102: mod_base = OTHER; note = uniform ribonucleotides (A, C, G, inosine or U), deoxynucleotides (A, G, C, inosine or T), ribonebularine, 2'-O-methylnebularine or deoxynebularine
  modified_base 103: mod_base = OTHER; note = uniform ribonucleotides (A, C, G, inosine or U), deoxynucleotides (A, G, C, inosine or T), ribonebularine, 2'-O-methylnebularine or deoxynebularine
  modified_base 1..3: mod_base = OTHER; note = phosphorothioate linkage
  modified_base 64..65: mod_base = OTHER; note = phosphorothioate linkage
  modified_base 97..100: mod_base = OTHER; note = phosphorothioate linkage
  misc_feature 1..100: note = RNA
  misc_feature 101..103: note = Optionally DNA or RNA

SEQ ID NO: 2901 - DNA, 103 bp, synthetic construct; identical to SEQ ID NO: 1795
  source 1..103: mol_type = other DNA
  modified_base 1: mod_base = OTHER; note = 2'-O-methyl ribonucleotide
  modified_base 2: mod_base = OTHER; note = 2'-O-methyl ribonucleotide
  modified_base 3: mod_base = OTHER; note = 2'-O-methyl ribonucleotide
  modified_base 21: mod_base = OTHER; note = 2'-O-methyl ribonucleotide
  modified_base 28: mod_base = OTHER; note = 2'-O-methyl ribonucleotide
  modified_base 29: mod_base = OTHER; note = 2'-O-methyl ribonucleotide
  modified_base 30: mod_base = OTHER; note = 2'-O-methyl ribonucleotide
  modified_base 31: mod_base = OTHER; note = 2'-O-methyl ribonucleotide
  modified_base 32: mod_base = OTHER; note = 2'-O-methyl ribonucleotide
  modified_base 34: mod_base = OTHER; note = 2'-O-methyl ribonucleotide
  modified_base 35: mod_base = OTHER; note = 2'-O-methyl ribonucleotide
  modified_base 36: mod_base = OTHER; note = 2'-O-methyl ribonucleotide
  modified_base 37: mod_base = OTHER; note = 2'-O-methyl ribonucleotide
  modified_base 38: mod_base = OTHER; note = 2'-O-methyl ribonucleotide
  modified_base 39: mod_base = OTHER; note = 2'-O-methyl ribonucleotide
  modified_base 40: mod_base = OTHER; note = 2'-O-methyl ribonucleotide
  modified_base 41: mod_base = OTHER; note = 2'-O-methyl ribonucleotide
  modified_base 42: mod_base = OTHER; note = 2'-O-methyl ribonucleotide
  modified_base 46: mod_base = OTHER; note = 2'-O-methyl ribonucleotide
  modified_base 48: mod_base = OTHER; note = 2'-O-methyl ribonucleotide
  modified_base 50: mod_base = OTHER; note = 2'-O-methyl ribonucleotide
  modified_base 52: mod_base = OTHER; note = 2'-O-methyl ribonucleotide
  modified_base 53: mod_base = OTHER; note = 2'-O-methyl ribonucleotide
  modified_base 54: mod_base = OTHER; note = 2'-O-methyl ribonucleotide
  modified_base 55: mod_base = OTHER; note = 2'-O-methyl ribonucleotide
  modified_base 56: mod_base = OTHER; note = 2'-O-methyl ribonucleotide
  modified_base 57: mod_base = OTHER; note = 2'-O-methyl ribonucleotide
  modified_base 60: mod_base = OTHER; note = 2'-O-methyl ribonucleotide
  modified_base 61: mod_base = OTHER; note = 2'-O-methyl ribonucleotide
  modified_base 66: mod_base = OTHER; note = 2'-O-methyl ribonucleotide
  modified_base 67: mod_base = OTHER; note = 2'-O-methyl ribonucleotide
  modified_base 70: mod_base = OTHER; note = 2'-O-methyl ribonucleotide
  modified_base 71: mod_base = OTHER; note = 2'-O-methyl ribonucleotide
  modified_base 72: mod_base = OTHER; note = 2'-O-methyl ribonucleotide
  modified_base 74: mod_base = OTHER; note = 2'-O-methyl ribonucleotide
  modified_base 75: mod_base = OTHER; note = 2'-O-methyl ribonucleotide
  modified_base 76: mod_base = OTHER; note = 2'-O-methyl ribonucleotide
  modified_base 77: mod_base = OTHER; note = 2'-O-methyl ribonucleotide
  modified_base 78: mod_base = OTHER; note = 2'-O-methyl ribonucleotide
  modified_base 79: mod_base = OTHER; note = 2'-O-methyl ribonucleotide
  modified_base 80: mod_base = OTHER; note = 2'-O-methyl ribonucleotide
  modified_base 81: mod_base = OTHER; note = 2'-O-methyl ribonucleotide
  modified_base 83: mod_base = OTHER; note = 2'-O-methyl ribonucleotide
  modified_base 84: mod_base = OTHER; note = 2'-O-methyl ribonucleotide
  modified_base 85: mod_base = OTHER; note = 2'-O-methyl ribonucleotide
  modified_base 86: mod_base = OTHER; note = 2'-O-methyl ribonucleotide
  modified_base 87: mod_base = OTHER; note = 2'-O-methyl ribonucleotide
  modified_base 88: mod_base = OTHER; note = 2'-O-methyl ribonucleotide
  modified_base 89: mod_base = OTHER; note = 2'-O-methyl ribonucleotide
  modified_base 90: mod_base = OTHER; note = 2'-O-methyl ribonucleotide
  modified_base 91: mod_base = OTHER; note = 2'-O-methyl ribonucleotide
  modified_base 92: mod_base = OTHER; note = 2'-O-methyl ribonucleotide
  modified_base 93: mod_base = OTHER; note = 2'-O-methyl ribonucleotide
  modified_base 94: mod_base = OTHER; note = 2'-O-methyl ribonucleotide
  modified_base 95: mod_base = OTHER; note = 2'-O-methyl ribonucleotide
  modified_base 96: mod_base = OTHER; note = 2'-O-methyl ribonucleotide
  modified_base 97: mod_base = OTHER; note = 2'-O-methyl ribonucleotide
  modified_base 98: mod_base = OTHER; note = 2'-O-methyl ribonucleotide
  modified_base 99: mod_base = OTHER; note = 2'-O-methyl ribonucleotide
  modified_base 100: mod_base = OTHER; note = 2'-O-methyl ribonucleotide
  modified_base 101: mod_base = OTHER; note = uniform ribonucleotides (A, C, G, inosine or U), deoxynucleotides (A, G, C, inosine or T), ribonebularine, 2'-O-methylnebularine or deoxynebularine
  modified_base 102: mod_base = OTHER; note = uniform ribonucleotides (A, C, G, inosine or U), deoxynucleotides (A, G, C, inosine or T), ribonebularine, 2'-O-methylnebularine or deoxynebularine
  modified_base 103: mod_base = OTHER; note = uniform ribonucleotides (A, C, G, inosine or U), deoxynucleotides (A, G, C, inosine or T), ribonebularine, 2'-O-methylnebularine or deoxynebularine
  modified_base 1..3: mod_base = OTHER; note = phosphorothioate linkage
  modified_base 64..65: mod_base = OTHER; note = phosphorothioate linkage
  modified_base 97..100: mod_base = OTHER; note = phosphorothioate linkage
  misc_feature 1..100: note = RNA
  misc_feature 101..103: note = Optionally DNA or RNA

SEQ ID NO: 2902 - DNA, 103 bp, synthetic construct; identical to SEQ ID NO: 1796
  source 1..103: mol_type = other DNA
  modified_base 1: mod_base = OTHER; note = 2'-O-methyl ribonucleotide
  modified_base 2: mod_base = OTHER; note = 2'-O-methyl ribonucleotide
  modified_base 3: mod_base = OTHER; note = 2'-O-methyl ribonucleotide
  modified_base 21: mod_base = OTHER; note = 2'-O-methyl ribonucleotide
  modified_base 28: mod_base = OTHER; note = 2'-O-methyl ribonucleotide
  modified_base 29: mod_base = OTHER; note = 2'-O-methyl ribonucleotide
  modified_base 30: mod_base = OTHER; note = 2'-O-methyl ribonucleotide
  modified_base 31: mod_base = OTHER; note = 2'-O-methyl ribonucleotide
  modified_base 32: mod_base = OTHER; note = 2'-O-methyl ribonucleotide
  modified_base 33: mod_base = OTHER; note = 2'-O-methyl ribonucleotide
  modified_base 34: mod_base = OTHER; note = 2'-O-methyl ribonucleotide
  modified_base 35: mod_base = OTHER; note = 2'-O-methyl ribonucleotide
  modified_base 36: mod_base = OTHER; note = 2'-O-methyl ribonucleotide
  modified_base 37: mod_base = OTHER; note = 2'-O-methyl ribonucleotide
  modified_base 38: mod_base = OTHER; note = 2'-O-methyl ribonucleotide
  modified_base 39: mod_base = OTHER; note = 2'-O-methyl ribonucleotide
  modified_base 40: mod_base = OTHER; note = 2'-O-methyl ribonucleotide
  modified_base 41: mod_base = OTHER; note = 2'-O-methyl ribonucleotide
  modified_base 42: mod_base = OTHER; note = 2'-O-methyl ribonucleotide
  modified_base 46: mod_base = OTHER; note = 2'-O-methyl ribonucleotide
  modified_base 48: mod_base = OTHER; note = 2'-O-methyl ribonucleotide
  modified_base 50: mod_base = OTHER; note = 2'-O-methyl ribonucleotide
  modified_base 52: mod_base = OTHER; note = 2'-O-methyl ribonucleotide
  modified_base 53: mod_base = OTHER; note = 2'-O-methyl ribonucleotide
  modified_base 54: mod_base = OTHER; note = 2'-O-methyl ribonucleotide
  modified_base 55: mod_base = OTHER; note = 2'-O-methyl ribonucleotide
  modified_base 56: mod_base = OTHER; note = 2'-O-methyl ribonucleotide
  modified_base 57: mod_base = OTHER; note = 2'-O-methyl ribonucleotide
  modified_base 60: mod_base = OTHER; note = 2'-O-methyl ribonucleotide
  modified_base 61: mod_base = OTHER; note = 2'-O-methyl ribonucleotide
  modified_base 66: mod_base = OTHER; note = 2'-O-methyl ribonucleotide
  modified_base 67: mod_base = OTHER; note = 2'-O-methyl ribonucleotide
  modified_base 70: mod_base = OTHER; note = 2'-O-methyl ribonucleotide
  modified_base 71: mod_base = OTHER; note = 2'-O-methyl ribonucleotide
  modified_base 72: mod_base = OTHER; note = 2'-O-methyl ribonucleotide
  modified_base 73: mod_base = OTHER; note = 2'-O-methyl ribonucleotide
  modified_base 74: mod_base = OTHER; note = 2'-O-methyl ribonucleotide
  modified_base 75: mod_base = OTHER; note = 2'-O-methyl ribonucleotide
  modified_base 76: mod_base = OTHER; note = 2'-O-methyl ribonucleotide
  modified_base 77: mod_base = OTHER; note = 2'-O-methyl ribonucleotide
  modified_base 78: mod_base = OTHER; note = 2'-O-methyl ribonucleotide
  modified_base 79: mod_base = OTHER; note = 2'-O-methyl ribonucleotide
  modified_base 80: mod_base = OTHER; note = 2'-O-methyl ribonucleotide
  modified_base 81: mod_base = OTHER; note = 2'-O-methyl ribonucleotide
  modified_base 83: mod_base = OTHER; note = 2'-O-methyl ribonucleotide
  modified_base 84: mod_base = OTHER; note = 2'-O-methyl ribonucleotide
  modified_base 85: mod_base = OTHER; note = 2'-O-methyl ribonucleotide
  modified_base 86: mod_base = OTHER; note = 2'-O-methyl ribonucleotide
  modified_base 87: mod_base = OTHER; note = 2'-O-methyl ribonucleotide
  modified_base 88: mod_base = OTHER; note = 2'-O-methyl ribonucleotide
  modified_base 89: mod_base = OTHER; note = 2'-O-methyl ribonucleotide
  modified_base 90: mod_base = OTHER; note = 2'-O-methyl ribonucleotide
  modified_base 91: mod_base = OTHER; note = 2'-O-methyl ribonucleotide
  modified_base 92: mod_base = OTHER; note = 2'-O-methyl ribonucleotide
  modified_base 93: mod_base = OTHER; note = 2'-O-methyl ribonucleotide
  modified_base 94: mod_base = OTHER; note = 2'-O-methyl ribonucleotide
  modified_base 95: mod_base = OTHER; note = 2'-O-methyl ribonucleotide
  modified_base 96: mod_base = OTHER; note = 2'-O-methyl ribonucleotide
  modified_base 97: mod_base = OTHER; note = 2'-O-methyl ribonucleotide
  modified_base 98: mod_base = OTHER; note = 2'-O-methyl ribonucleotide
  modified_base 99: mod_base = OTHER; note = 2'-O-methyl ribonucleotide
  modified_base 100: mod_base = OTHER; note = 2'-O-methyl ribonucleotide
  modified_base 101: mod_base = OTHER; note = uniform ribonucleotides (A, C, G, inosine or U), deoxynucleotides (A, G, C, inosine or T), ribonebularine, 2'-O-methylnebularine or deoxynebularine
  modified_base 102: mod_base = OTHER; note = uniform ribonucleotides (A, C, G, inosine or U), deoxynucleotides (A, G, C, inosine or T), ribonebularine, 2'-O-methylnebularine or deoxynebularine
  modified_base 103: mod_base = OTHER; note = uniform ribonucleotides (A, C, G, inosine or U), deoxynucleotides (A, G, C, inosine or T), ribonebularine, 2'-O-methylnebularine or deoxynebularine
  modified_base 1..3: mod_base = OTHER; note = phosphorothioate linkage
  modified_base 64..65: mod_base = OTHER; note = phosphorothioate linkage
  modified_base 97..100: mod_base = OTHER; note = phosphorothioate linkage
  misc_feature 1..100: note = RNA
  misc_feature 101..103: note = Optionally DNA or RNA

SEQ ID NO: 2903 - DNA, 103 bp, synthetic construct; identical to SEQ ID NO: 1796
  source 1..103: mol_type = other DNA
  modified_base 1: mod_base = OTHER; note = 2'-O-methyl ribonucleotide
  modified_base 2: mod_base = OTHER; note = 2'-O-methyl ribonucleotide
  modified_base 3: mod_base = OTHER; note = 2'-O-methyl ribonucleotide
  modified_base 21: mod_base = OTHER; note = 2'-O-methyl ribonucleotide
  modified_base 28: mod_base = OTHER; note = 2'-O-methyl ribonucleotide
  modified_base 29: mod_base = OTHER; note = 2'-O-methyl ribonucleotide
  modified_base 30: mod_base = OTHER; note = 2'-O-methyl ribonucleotide
  modified_base 31: mod_base = OTHER; note = 2'-O-methyl ribonucleotide
  modified_base 32: mod_base = OTHER; note = 2'-O-methyl ribonucleotide
  modified_base 34: mod_base = OTHER; note = 2'-O-methyl ribonucleotide
  modified_base 35: mod_base = OTHER; note = 2'-O-methyl ribonucleotide
  modified_base 36: mod_base = OTHER; note = 2'-O-methyl ribonucleotide
  modified_base 37: mod_base = OTHER; note = 2'-O-methyl ribonucleotide
  modified_base 38: mod_base = OTHER; note = 2'-O-methyl ribonucleotide
  modified_base 39: mod_base = OTHER; note = 2'-O-methyl ribonucleotide
  modified_base 40: mod_base = OTHER; note = 2'-O-methyl ribonucleotide
  modified_base 41: mod_base = OTHER; note = 2'-O-methyl ribonucleotide
  modified_base 42: mod_base = OTHER; note = 2'-O-methyl ribonucleotide
  modified_base 46: mod_base = OTHER; note = 2'-O-methyl ribonucleotide
  modified_base 48: mod_base = OTHER; note = 2'-O-methyl ribonucleotide
  modified_base 50: mod_base = OTHER; note = 2'-O-methyl ribonucleotide
  modified_base 52: mod_base = OTHER; note = 2'-O-methyl ribonucleotide
  modified_base 53: mod_base = OTHER; note = 2'-O-methyl ribonucleotide
  modified_base 54: mod_base = OTHER; note = 2'-O-methyl ribonucleotide
  modified_base 55: mod_base = OTHER; note = 2'-O-methyl ribonucleotide
  modified_base 56: mod_base = OTHER; note = 2'-O-methyl ribonucleotide
  modified_base 57: mod_base = OTHER; note = 2'-O-methyl ribonucleotide
  modified_base 60: mod_base = OTHER; note = 2'-O-methyl ribonucleotide
  modified_base 61: mod_base = OTHER; note = 2'-O-methyl ribonucleotide
  modified_base 66: mod_base = OTHER; note = 2'-O-methyl ribonucleotide
  modified_base 67: mod_base = OTHER; note = 2'-O-methyl ribonucleotide
  modified_base 70: mod_base = OTHER; note = 2'-O-methyl ribonucleotide
  modified_base 71: mod_base = OTHER; note = 2'-O-methyl ribonucleotide
  modified_base 72: mod_base = OTHER; note = 2'-O-methyl ribonucleotide
  modified_base 74: mod_base = OTHER; note = 2'-O-methyl ribonucleotide
  modified_base 75: mod_base = OTHER; note = 2'-O-methyl ribonucleotide
  modified_base 76: mod_base = OTHER; note = 2'-O-methyl ribonucleotide
  modified_base 77: mod_base = OTHER; note = 2'-O-methyl ribonucleotide
  modified_base 78: mod_base = OTHER; note = 2'-O-methyl ribonucleotide
  modified_base 79: mod_base = OTHER; note = 2'-O-methyl ribonucleotide
  modified_base 80: mod_base = OTHER; note = 2'-O-methyl ribonucleotide
  modified_base 81: mod_base = OTHER; note = 2'-O-methyl ribonucleotide
  modified_base 83: mod_base = OTHER; note = 2'-O-methyl ribonucleotide
  modified_base 84: mod_base = OTHER; note = 2'-O-methyl ribonucleotide
  modified_base 85: mod_base = OTHER; note = 2'-O-methyl ribonucleotide
  modified_base 86: mod_base = OTHER; note = 2'-O-methyl ribonucleotide
  modified_base 87: mod_base = OTHER; note = 2'-O-methyl ribonucleotide
  modified_base 88: mod_base = OTHER; note = 2'-O-methyl ribonucleotide
  modified_base 89: mod_base = OTHER; note = 2'-O-methyl ribonucleotide
  modified_base 90: mod_base = OTHER; note = 2'-O-methyl ribonucleotide
  modified_base 91: mod_base = OTHER; note = 2'-O-methyl ribonucleotide
  modified_base 92: mod_base = OTHER; note = 2'-O-methyl ribonucleotide
  modified_base 93: mod_base = OTHER; note = 2'-O-methyl ribonucleotide
  modified_base 94: mod_base = OTHER; note = 2'-O-methyl ribonucleotide
  modified_base 95: mod_base = OTHER; note = 2'-O-methyl ribonucleotide
  modified_base 96: mod_base = OTHER; note = 2'-O-methyl ribonucleotide
  modified_base 97: mod_base = OTHER; note = 2'-O-methyl ribonucleotide
  modified_base 98: mod_base = OTHER; note = 2'-O-methyl ribonucleotide
  modified_base 99: mod_base = OTHER; note = 2'-O-methyl ribonucleotide
  modified_base 100: mod_base = OTHER; note = 2'-O-methyl ribonucleotide
  modified_base 101: mod_base = OTHER; note = uniform ribonucleotides (A, C, G, inosine or U), deoxynucleotides (A, G, C, inosine or T), ribonebularine, 2'-O-methylnebularine or deoxynebularine
  modified_base 102: mod_base = OTHER; note = uniform ribonucleotides (A, C, G, inosine or U), deoxynucleotides (A, G, C, inosine or T), ribonebularine, 2'-O-methylnebularine or deoxynebularine
  modified_base 103: mod_base = OTHER; note = uniform ribonucleotides (A, C, G, inosine or U), deoxynucleotides (A, G, C, inosine or T), ribonebularine, 2'-O-methylnebularine or deoxynebularine
  modified_base 1..3: mod_base = OTHER; note = phosphorothioate linkage
  modified_base 64..65: mod_base = OTHER; note = phosphorothioate linkage
  modified_base 97..100: mod_base = OTHER; note = phosphorothioate linkage
  misc_feature 1..100: note = RNA
  misc_feature 101..103: note = Optionally DNA or RNA

SEQ ID NO: 2904 - DNA, 103 bp, synthetic construct; identical to SEQ ID NO: 1797
  source 1..103: mol_type = other DNA
  modified_base 1: mod_base = OTHER; note = 2'-O-methyl ribonucleotide
  modified_base 2: mod_base = OTHER; note = 2'-O-methyl ribonucleotide
  modified_base 3: mod_base = OTHER; note = 2'-O-methyl ribonucleotide
  modified_base 21: mod_base = OTHER; note = 2'-O-methyl ribonucleotide
  modified_base 28: mod_base = OTHER; note = 2'-O-methyl ribonucleotide
  modified_base 29: mod_base = OTHER; note = 2'-O-methyl ribonucleotide
  modified_base 30: mod_base = OTHER; note = 2'-O-methyl ribonucleotide
  modified_base 31: mod_base = OTHER; note = 2'-O-methyl ribonucleotide
  modified_base 32: mod_base = OTHER; note = 2'-O-methyl ribonucleotide
  modified_base 33: mod_base = OTHER; note = 2'-O-methyl ribonucleotide
  modified_base 34: mod_base = OTHER; note = 2'-O-methyl ribonucleotide
  modified_base 35: mod_base = OTHER; note = 2'-O-methyl ribonucleotide
  modified_base 36: mod_base = OTHER; note = 2'-O-methyl ribonucleotide
  modified_base 37: mod_base = OTHER; note = 2'-O-methyl ribonucleotide
  modified_base 38: mod_base = OTHER; note = 2'-O-methyl ribonucleotide
  modified_base 39: mod_base = OTHER; note = 2'-O-methyl ribonucleotide
  modified_base 40: mod_base = OTHER; note = 2'-O-methyl ribonucleotide
  modified_base 41: mod_base = OTHER; note = 2'-O-methyl ribonucleotide
  modified_base 42: mod_base = OTHER; note = 2'-O-methyl ribonucleotide
  modified_base 46: mod_base = OTHER; note = 2'-O-methyl ribonucleotide
  modified_base 48: mod_base = OTHER; note = 2'-O-methyl ribonucleotide
  modified_base 50: mod_base = OTHER; note = 2'-O-methyl ribonucleotide
  modified_base 52: mod_base = OTHER; note = 2'-O-methyl ribonucleotide
  modified_base 53: mod_base = OTHER; note = 2'-O-methyl ribonucleotide
  modified_base 54: mod_base = OTHER; note = 2'-O-methyl ribonucleotide
  modified_base 57: mod_base = OTHER; note = 2'-O-methyl ribonucleotide
  modified_base 61: mod_base = OTHER; note = 2'-O-methyl ribonucleotide
  modified_base 66: mod_base = OTHER; note = 2'-O-methyl ribonucleotide
  modified_base 67: mod_base = OTHER; note = 2'-O-methyl ribonucleotide
  modified_base 70: mod_base = OTHER; note = 2'-O-methyl ribonucleotide
  modified_base 71: mod_base = OTHER; note = 2'-O-methyl ribonucleotide
  modified_base 72: mod_base = OTHER; note = 2'-O-methyl ribonucleotide
  modified_base 74: mod_base = OTHER; note = 2'-O-methyl ribonucleotide
  modified_base 75: mod_base = OTHER; note = 2'-O-methyl ribonucleotide
  modified_base 76: mod_base = OTHER; note = 2'-O-methyl ribonucleotide
  modified_base 77: mod_base = OTHER; note = 2'-O-methyl ribonucleotide
  modified_base 78: mod_base = OTHER; note = 2'-O-methyl ribonucleotide
  modified_base 79: mod_base = OTHER; note = 2'-O-methyl ribonucleotide
  modified_base 80: mod_base = OTHER; note = 2'-O-methyl ribonucleotide
  modified_base 82: mod_base = OTHER; note = 2'-O-methyl ribonucleotide
  modified_base 83: mod_base = OTHER; note = 2'-O-methyl ribonucleotide
  modified_base 84: mod_base = OTHER; note = 2'-O-methyl ribonucleotide
  modified_base 85: mod_base = OTHER; note = 2'-O-methyl ribonucleotide
  modified_base 86: mod_base = OTHER; note = 2'-O-methyl ribonucleotide
  modified_base 87: mod_base = OTHER; note = 2'-O-methyl ribonucleotide
  modified_base 89: mod_base = OTHER; note = 2'-O-methyl ribonucleotide
  modified_base 92: mod_base = OTHER; note = 2'-O-methyl ribonucleotide
  modified_base 93: mod_base = OTHER; note = 2'-O-methyl ribonucleotide
  modified_base 94: mod_base = OTHER; note = 2'-O-methyl ribonucleotide
  modified_base 95: mod_base = OTHER; note = 2'-O-methyl ribonucleotide
  modified_base 96: mod_base = OTHER; note = 2'-O-methyl ribonucleotide
  modified_base 97: mod_base = OTHER; note = 2'-O-methyl ribonucleotide
  modified_base 98: mod_base = OTHER; note = 2'-O-methyl ribonucleotide
  modified_base 99: mod_base = OTHER; note = 2'-O-methyl ribonucleotide
  modified_base 100: mod_base = OTHER; note = 2'-O-methyl ribonucleotide
  modified_base 101: mod_base = OTHER; note = uniform ribonucleotides (A, C, G, inosine or U), deoxynucleotides (A, G, C, inosine or T), ribonebularine, 2'-O-methylnebularine or deoxynebularine
  modified_base 102: mod_base = OTHER; note = uniform ribonucleotides (A, C, G, inosine or U), deoxynucleotides (A, G, C, inosine or T), ribonebularine, 2'-O-methylnebularine or deoxynebularine
  modified_base 103: mod_base = OTHER; note = uniform ribonucleotides (A, C, G, inosine or U), deoxynucleotides (A, G, C, inosine or T), ribonebularine, 2'-O-methylnebularine or deoxynebularine
  modified_base 1..3: mod_base = OTHER; note = phosphorothioate linkage
  modified_base 64..65: mod_base = OTHER; note = phosphorothioate linkage
  modified_base 97..100: mod_base = OTHER; note = phosphorothioate linkage
  misc_feature 1..100: note = RNA
  misc_feature 101..103: note = Optionally DNA or RNA

SEQ ID NO: 2905 - DNA, 103 bp, synthetic construct; identical to SEQ ID NO: 1797
  source 1..103: mol_type = other DNA
  modified_base 1: mod_base = OTHER; note = 2'-O-methyl ribonucleotide
  modified_base 2: mod_base = OTHER; note = 2'-O-methyl ribonucleotide
  modified_base 3: mod_base = OTHER; note = 2'-O-methyl ribonucleotide
  modified_base 21: mod_base = OTHER; note = 2'-O-methyl ribonucleotide
  modified_base 28: mod_base = OTHER; note = 2'-O-methyl ribonucleotide
  modified_base 29: mod_base = OTHER; note = 2'-O-methyl ribonucleotide
  modified_base 30: mod_base = OTHER; note = 2'-O-methyl ribonucleotide
  modified_base 31: mod_base = OTHER; note = 2'-O-methyl ribonucleotide
  modified_base 32: mod_base = OTHER; note = 2'-O-methyl ribonucleotide
  modified_base 33: mod_base = OTHER; note = 2'-O-methyl ribonucleotide
  modified_base 34: mod_base = OTHER; note = 2'-O-methyl ribonucleotide
  modified_base 35: mod_base = OTHER; note = 2'-O-methyl ribonucleotide
  modified_base 36: mod_base = OTHER; note = 2'-O-methyl ribonucleotide
  modified_base 37: mod_base = OTHER; note = 2'-O-methyl ribonucleotide
  modified_base 38: mod_base = OTHER; note = 2'-O-methyl ribonucleotide
  modified_base 39: mod_base = OTHER; note = 2'-O-methyl ribonucleotide
  modified_base 40: mod_base = OTHER; note = 2'-O-methyl ribonucleotide
  modified_base 41: mod_base = OTHER; note = 2'-O-methyl ribonucleotide
  modified_base 42: mod_base = OTHER; note = 2'-O-methyl ribonucleotide
  modified_base 46: mod_base = OTHER; note = 2'-O-methyl ribonucleotide
  modified_base 48: mod_base = OTHER; note = 2'-O-methyl ribonucleotide
  modified_base 50: mod_base = OTHER; note = 2'-O-methyl ribonucleotide
  modified_base 52: mod_base = OTHER; note = 2'-O-methyl ribonucleotide
  modified_base 53: mod_base = OTHER; note = 2'-O-methyl ribonucleotide
  modified_base 54: mod_base = OTHER; note = 2'-O-methyl ribonucleotide
  modified_base 55: mod_base = OTHER; note = 2'-O-methyl ribonucleotide
  modified_base 56: mod_base = OTHER; note = 2'-O-methyl ribonucleotide
  modified_base 57: mod_base = OTHER; note = 2'-O-methyl ribonucleotide
  modified_base 60: mod_base = OTHER; note = 2'-O-methyl ribonucleotide
  modified_base 61: mod_base = OTHER; note = 2'-O-methyl ribonucleotide
  modified_base 66: mod_base = OTHER; note = 2'-O-methyl ribonucleotide
  modified_base 67: mod_base = OTHER; note = 2'-O-methyl ribonucleotide
  modified_base 70: mod_base = OTHER; note = 2'-O-methyl ribonucleotide
  modified_base 71: mod_base = OTHER; note = 2'-O-methyl ribonucleotide
  modified_base 72: mod_base = OTHER; note = 2'-O-methyl ribonucleotide
  modified_base 74: mod_base = OTHER; note = 2'-O-methyl ribonucleotide
  modified_base 75: mod_base = OTHER; note = 2'-O-methyl ribonucleotide
  modified_base 76: mod_base = OTHER; note = 2'-O-methyl ribonucleotide
  modified_base 77: mod_base = OTHER; note = 2'-O-methyl ribonucleotide
  modified_base 78: mod_base = OTHER; note = 2'-O-methyl ribonucleotide
  modified_base 79: mod_base = OTHER; note = 2'-O-methyl ribonucleotide
  modified_base 80: mod_base = OTHER; note = 2'-O-methyl ribonucleotide
  modified_base 82: mod_base = OTHER; note = 2'-O-methyl ribonucleotide
  modified_base 83: mod_base = OTHER; note = 2'-O-methyl ribonucleotide
  modified_base 84: mod_base = OTHER; note = 2'-O-methyl ribonucleotide
  modified_base 85: mod_base = OTHER; note = 2'-O-methyl ribonucleotide
  modified_base 86: mod_base = OTHER; note = 2'-O-methyl ribonucleotide
  modified_base 87: mod_base = OTHER; note = 2'-O-methyl ribonucleotide
  modified_base 89: mod_base = OTHER; note = 2'-O-methyl ribonucleotide
  modified_base 92: mod_base = OTHER; note = 2'-O-methyl ribonucleotide
  modified_base 93: mod_base = OTHER; note = 2'-O-methyl ribonucleotide
  modified_base 94: mod_base = OTHER; note = 2'-O-methyl ribonucleotide
  modified_base 95: mod_base = OTHER; note = 2'-O-methyl ribonucleotide
  modified_base 96: mod_base = OTHER; note = 2'-O-methyl ribonucleotide
  modified_base 97: mod_base = OTHER; note = 2'-O-methyl ribonucleotide
  modified_base 98: mod_base = OTHER; note = 2'-O-methyl ribonucleotide
  modified_base 99: mod_base = OTHER; note = 2'-O-methyl ribonucleotide
  modified_base 100: mod_base = OTHER; note = 2'-O-methyl ribonucleotide
  modified_base 101: mod_base = OTHER; note = uniform ribonucleotides (A, C, G, inosine or U), deoxynucleotides (A, G, C, inosine or T), ribonebularine, 2'-O-methylnebularine or deoxynebularine
  modified_base 102: mod_base = OTHER; note = uniform ribonucleotides (A, C, G, inosine or U), deoxynucleotides (A, G, C, inosine or T), ribonebularine, 2'-O-methylnebularine or deoxynebularine
  modified_base 103: mod_base = OTHER; note = uniform ribonucleotides (A, C, G, inosine or U), deoxynucleotides (A, G, C, inosine or T), ribonebularine, 2'-O-methylnebularine or deoxynebularine
  modified_base 1..3: mod_base = OTHER; note = phosphorothioate linkage
  modified_base 64..65: mod_base = OTHER; note = phosphorothioate linkage
  modified_base 97..100: mod_base = OTHER; note = phosphorothioate linkage
  misc_feature 1..100: note = RNA
  misc_feature 101..103: note = Optionally DNA or RNA

SEQ ID NO: 2906 - DNA, 103 bp, synthetic construct; identical to SEQ ID NO: 1797
  source 1..103: mol_type = other DNA
  modified_base 1: mod_base = OTHER; note = 2'-O-methyl ribonucleotide
  modified_base 2: mod_base = OTHER; note = 2'-O-methyl ribonucleotide
  modified_base 3: mod_base = OTHER; note = 2'-O-methyl ribonucleotide
  modified_base 21: mod_base = OTHER; note = 2'-O-methyl ribonucleotide
  modified_base 28: mod_base = OTHER; note = 2'-O-methyl ribonucleotide
  modified_base 29: mod_base = OTHER; note = 2'-O-methyl ribonucleotide
  modified_base 30: mod_base = OTHER; note = 2'-O-methyl ribonucleotide
  modified_base 31: mod_base = OTHER; note = 2'-O-methyl ribonucleotide
  modified_base 32: mod_base = OTHER; note = 2'-O-methyl ribonucleotide
  modified_base 33: mod_base = OTHER; note = 2'-O-methyl ribonucleotide
  modified_base 34: mod_base = OTHER; note = 2'-O-methyl ribonucleotide
  modified_base 35: mod_base = OTHER; note = 2'-O-methyl ribonucleotide
  modified_base 36: mod_base = OTHER; note = 2'-O-methyl ribonucleotide
  modified_base 37: mod_base = OTHER; note = 2'-O-methyl ribonucleotide
  modified_base 38: mod_base = OTHER; note = 2'-O-methyl ribonucleotide
  modified_base 39: mod_base = OTHER; note = 2'-O-methyl ribonucleotide
  modified_base 40: mod_base = OTHER; note = 2'-O-methyl ribonucleotide
  modified_base 41: mod_base = OTHER; note = 2'-O-methyl ribonucleotide
  modified_base 42: mod_base = OTHER; note = 2'-O-methyl ribonucleotide
  modified_base 46: mod_base = OTHER; note = 2'-O-methyl ribonucleotide
  modified_base 48: mod_base = OTHER; note = 2'-O-methyl ribonucleotide
  modified_base 50: mod_base = OTHER; note = 2'-O-methyl ribonucleotide
  modified_base 52: mod_base = OTHER; note = 2'-O-methyl ribonucleotide
  modified_base 53: mod_base = OTHER; note = 2'-O-methyl ribonucleotide
  modified_base 54: mod_base = OTHER; note = 2'-O-methyl ribonucleotide
  modified_base 57: mod_base = OTHER; note = 2'-O-methyl ribonucleotide
  modified_base 61: mod_base = OTHER; note = 2'-O-methyl ribonucleotide
  modified_base 66: mod_base = OTHER; note = 2'-O-methyl ribonucleotide
  modified_base 67: mod_base = OTHER; note = 2'-O-methyl ribonucleotide
  modified_base 70: mod_base = OTHER; note = 2'-O-methyl ribonucleotide
  modified_base 71: mod_base = OTHER; note = 2'-O-methyl ribonucleotide
  modified_base 72: mod_base = OTHER; note = 2'-O-methyl ribonucleotide
  modified_base 73: mod_base = OTHER; note = 2'-O-methyl ribonucleotide
  modified_base 74: mod_base = OTHER; note = 2'-O-methyl ribonucleotide
  modified_base 75: mod_base = OTHER; note = 2'-O-methyl ribonucleotide
  modified_base 76: mod_base = OTHER; note = 2'-O-methyl ribonucleotide
  modified_base 77: mod_base = OTHER; note = 2'-O-methyl ribonucleotide
  modified_base 78: mod_base = OTHER; note = 2'-O-methyl ribonucleotide
  modified_base 79: mod_base = OTHER; note = 2'-O-methyl ribonucleotide
  modified_base 80: mod_base = OTHER; note = 2'-O-methyl ribonucleotide
  modified_base 82: mod_base = OTHER; note = 2'-O-methyl ribonucleotide
  modified_base 83: mod_base = OTHER; note = 2'-O-methyl ribonucleotide
  modified_base 84: mod_base = OTHER; note = 2'-O-methyl ribonucleotide
  modified_base 85: mod_base = OTHER; note = 2'-O-methyl ribonucleotide
  modified_base 86: mod_base = OTHER; note = 2'-O-methyl ribonucleotide
  modified_base 87: mod_base = OTHER; note = 2'-O-methyl ribonucleotide
  modified_base 89: mod_base = OTHER; note = 2'-O-methyl ribonucleotide
  modified_base 92: mod_base = OTHER; note = 2'-O-methyl ribonucleotide
  modified_base 93: mod_base = OTHER; note = 2'-O-methyl ribonucleotide
  modified_base 94: mod_base = OTHER; note = 2'-O-methyl ribonucleotide
  modified_base 95: mod_base = OTHER; note = 2'-O-methyl ribonucleotide
  modified_base 96: mod_base = OTHER; note = 2'-O-methyl ribonucleotide
  modified_base 97: mod_base = OTHER; note = 2'-O-methyl ribonucleotide
  modified_base 98: mod_base = OTHER; note = 2'-O-methyl ribonucleotide
  modified_base 99: mod_base = OTHER; note = 2'-O-methyl ribonucleotide
  modified_base 100: mod_base = OTHER; note = 2'-O-methyl ribonucleotide
  modified_base 101: mod_base = OTHER; note = uniform ribonucleotides (A, C, G, inosine or U), deoxynucleotides (A, G, C, inosine or T), ribonebularine, 2'-O-methylnebularine or deoxynebularine
  modified_base 102: mod_base = OTHER; note = uniform ribonucleotides (A, C, G, inosine or U), deoxynucleotides (A, G, C, inosine or T), ribonebularine, 2'-O-methylnebularine or deoxynebularine
  modified_base 103: mod_base = OTHER; note = uniform ribonucleotides (A, C, G, inosine or U), deoxynucleotides (A, G, C, inosine or T), ribonebularine, 2'-O-methylnebularine or deoxynebularine
  modified_base 1..3: mod_base = OTHER; note = phosphorothioate linkage
  modified_base 64..65: mod_base = OTHER; note = phosphorothioate linkage
  modified_base 97..100: mod_base = OTHER; note = phosphorothioate linkage
  misc_feature 1..100: note = RNA
  misc_feature 101..103: note = Optionally DNA or RNA

SEQ ID NO: 2907 - DNA, 103 bp, synthetic construct; identical to SEQ ID NO: 1797
  source 1..103: mol_type = other DNA
  modified_base 1: mod_base = OTHER; note = 2'-O-methyl ribonucleotide
  modified_base 2: mod_base = OTHER; note = 2'-O-methyl ribonucleotide
  modified_base 3: mod_base = OTHER; note = 2'-O-methyl ribonucleotide
  modified_base 21: mod_base = OTHER; note = 2'-O-methyl ribonucleotide
  modified_base 28: mod_base = OTHER; note = 2'-O-methyl ribonucleotide
  modified_base 29: mod_base = OTHER; note = 2'-O-methyl ribonucleotide
  modified_base 30: mod_base = OTHER; note = 2'-O-methyl ribonucleotide
  modified_base 31: mod_base = OTHER; note = 2'-O-methyl ribonucleotide
  modified_base 32: mod_base = OTHER; note = 2'-O-methyl ribonucleotide
  modified_base 33: mod_base = OTHER; note = 2'-O-methyl ribonucleotide
  modified_base 34: mod_base = OTHER; note = 2'-O-methyl ribonucleotide
  modified_base 35: mod_base = OTHER; note = 2'-O-methyl ribonucleotide
  modified_base 36: mod_base = OTHER; note = 2'-O-methyl ribonucleotide
  modified_base 37: mod_base = OTHER; note = 2'-O-methyl ribonucleotide
  modified_base 38: mod_base = OTHER; note = 2'-O-methyl ribonucleotide
  modified_base 39: mod_base = OTHER; note = 2'-O-methyl ribonucleotide
  modified_base 40: mod_base = OTHER; note = 2'-O-methyl ribonucleotide
  modified_base 41: mod_base = OTHER; note = 2'-O-methyl ribonucleotide
  modified_base 42: mod_base = OTHER; note = 2'-O-methyl ribonucleotide
  modified_base 46: mod_base = OTHER; note = 2'-O-methyl ribonucleotide
  modified_base 48: mod_base = OTHER; note = 2'-O-methyl ribonucleotide
  modified_base 50: mod_base = OTHER; note = 2'-O-methyl ribonucleotide
  modified_base 52: mod_base = OTHER; note = 2'-O-methyl ribonucleotide
  modified_base 53: mod_base = OTHER; note = 2'-O-methyl ribonucleotide
  modified_base 54: mod_base = OTHER; note = 2'-O-methyl ribonucleotide
  modified_base 57: mod_base = OTHER; note = 2'-O-methyl ribonucleotide
  modified_base 61: mod_base = OTHER; note = 2'-O-methyl ribonucleotide
  modified_base 66: mod_base = OTHER; note = 2'-O-methyl ribonucleotide
  modified_base 67: mod_base = OTHER; note = 2'-O-methyl ribonucleotide
  modified_base 70: mod_base = OTHER; note = 2'-O-methyl ribonucleotide
  modified_base 71: mod_base = OTHER; note = 2'-O-methyl ribonucleotide
  modified_base 72: mod_base = OTHER; note = 2'-O-methyl ribonucleotide
  modified_base 73: mod_base = OTHER; note = 2'-O-methyl ribonucleotide
  modified_base 74: mod_base = OTHER; note = 2'-O-methyl ribonucleotide
  modified_base 75: mod_base = OTHER; note = 2'-O-methyl ribonucleotide
  modified_base 76: mod_base = OTHER; note = 2'-O-methyl ribonucleotide
  modified_base 77: mod_base = OTHER; note = 2'-O-methyl ribonucleotide
  modified_base 78: mod_base = OTHER; note = 2'-O-methyl ribonucleotide
  modified_base 79: mod_base = OTHER; note = 2'-O-methyl ribonucleotide
  modified_base 80: mod_base = OTHER; note = 2'-O-methyl ribonucleotide
  modified_base 82: mod_base = OTHER; note = 2'-O-methyl ribonucleotide
  modified_base 83: mod_base = OTHER; note = 2'-O-methyl ribonucleotide
  modified_base 84: mod_base = OTHER; note = 2'-O-methyl ribonucleotide
  modified_base 85: mod_base = OTHER; note = 2'-O-methyl ribonucleotide
  modified_base 86: mod_base = OTHER; note = 2'-O-methyl ribonucleotide
  modified_base 87: mod_base = OTHER; note = 2'-O-methyl ribonucleotide
  modified_base 89: mod_base = OTHER; note = 2'-O-methyl ribonucleotide
  modified_base 91: mod_base = OTHER; note = 2'-O-methyl ribonucleotide
  modified_base 92: mod_base = OTHER; note = 2'-O-methyl ribonucleotide
  modified_base 93: mod_base = OTHER; note = 2'-O-methyl ribonucleotide
  modified_base 94: mod_base = OTHER; note = 2'-O-methyl ribonucleotide
  modified_base 95: mod_base = OTHER; note = 2'-O-methyl ribonucleotide
  modified_base 96: mod_base = OTHER; note = 2'-O-methyl ribonucleotide
  modified_base 97: mod_base = OTHER; note = 2'-O-methyl ribonucleotide
  modified_base 98: mod_base = OTHER; note = 2'-O-methyl ribonucleotide
  modified_base 99: mod_base = OTHER; note = 2'-O-methyl ribonucleotide
  modified_base 100: mod_base = OTHER; note = 2'-O-methyl ribonucleotide
  modified_base 101: mod_base = OTHER; note = uniform ribonucleotides (A, C, G, inosine or U), deoxynucleotides (A, G, C, inosine or T), ribonebularine, 2'-O-methylnebularine or deoxynebularine
  modified_base 102: mod_base = OTHER; note = uniform ribonucleotides (A, C, G, inosine or U), deoxynucleotides (A, G, C, inosine or T), ribonebularine, 2'-O-methylnebularine or deoxynebularine
  modified_base 103: mod_base = OTHER; note = uniform ribonucleotides (A, C, G, inosine or U), deoxynucleotides (A, G, C, inosine or T), ribonebularine, 2'-O-methylnebularine or deoxynebularine
  modified_base 1..3: mod_base = OTHER; note = phosphorothioate linkage
  modified_base 64..65: mod_base = OTHER; note = phosphorothioate linkage
  modified_base 97..100: mod_base = OTHER; note = phosphorothioate linkage
  misc_feature 1..100: note = RNA
  misc_feature 101..103: note = Optionally DNA or RNA

SEQ ID NO: 2908 - DNA, 103 bp, synthetic construct; identical to SEQ ID NO: 1797
  source 1..103: mol_type = other DNA
  modified_base 1: mod_base = OTHER; note = 2'-O-methyl ribonucleotide
  modified_base 2: mod_base = OTHER; note = 2'-O-methyl ribonucleotide
  modified_base 3: mod_base = OTHER; note = 2'-O-methyl ribonucleotide
  modified_base 21: mod_base = OTHER; note = 2'-O-methyl ribonucleotide
  modified_base 28: mod_base = OTHER; note = 2'-O-methyl ribonucleotide
  modified_base 29: mod_base = OTHER; note = 2'-O-methyl ribonucleotide
  modified_base 30: mod_base = OTHER; note = 2'-O-methyl ribonucleotide
  modified_base 31: mod_base = OTHER; note = 2'-O-methyl ribonucleotide
  modified_base 32: mod_base = OTHER; note = 2'-O-methyl ribonucleotide
  modified_base 34: mod_base = OTHER; note = 2'-O-methyl ribonucleotide
  modified_base 35: mod_base = OTHER; note = 2'-O-methyl ribonucleotide
  modified_base 36: mod_base = OTHER; note = 2'-O-methyl ribonucleotide
  modified_base 37: mod_base = OTHER; note = 2'-O-methyl ribonucleotide
  modified_base 38: mod_base = OTHER; note = 2'-O-methyl ribonucleotide
  modified_base 39: mod_base = OTHER; note = 2'-O-methyl ribonucleotide
  modified_base 40: mod_base = OTHER; note = 2'-O-methyl ribonucleotide
  modified_base 41: mod_base = OTHER; note = 2'-O-methyl ribonucleotide
  modified_base 42: mod_base = OTHER; note = 2'-O-methyl ribonucleotide
  modified_base 46: mod_base = OTHER; note = 2'-O-methyl ribonucleotide
  modified_base 48: mod_base = OTHER; note = 2'-O-methyl ribonucleotide
  modified_base 50: mod_base = OTHER; note = 2'-O-methyl ribonucleotide
  modified_base 52: mod_base = OTHER; note = 2'-O-methyl ribonucleotide
  modified_base 53: mod_base = OTHER; note = 2'-O-methyl ribonucleotide
  modified_base 54: mod_base = OTHER; note = 2'-O-methyl ribonucleotide
  modified_base 57: mod_base = OTHER; note = 2'-O-methyl ribonucleotide
  modified_base 61: mod_base = OTHER; note = 2'-O-methyl ribonucleotide
  modified_base 66: mod_base = OTHER; note = 2'-O-methyl ribonucleotide
  modified_base 67: mod_base = OTHER; note = 2'-O-methyl ribonucleotide
  modified_base 70: mod_base = OTHER; note = 2'-O-methyl ribonucleotide
  modified_base 71: mod_base = OTHER; note = 2'-O-methyl ribonucleotide
  modified_base 72: mod_base = OTHER; note = 2'-O-methyl ribonucleotide
  modified_base 73: mod_base = OTHER; note = 2'-O-methyl ribonucleotide
  modified_base 74: mod_base = OTHER; note = 2'-O-methyl ribonucleotide
  modified_base 75: mod_base = OTHER; note = 2'-O-methyl ribonucleotide
  modified_base 76: mod_base = OTHER; note = 2'-O-methyl ribonucleotide
  modified_base 77: mod_base = OTHER; note = 2'-O-methyl ribonucleotide
  modified_base 78: mod_base = OTHER; note = 2'-O-methyl ribonucleotide
  modified_base 79: mod_base = OTHER; note = 2'-O-methyl ribonucleotide
  modified_base 80: mod_base = OTHER; note = 2'-O-methyl ribonucleotide
  modified_base 82: mod_base = OTHER; note = 2'-O-methyl ribonucleotide
  modified_base 83: mod_base = OTHER; note = 2'-O-methyl ribonucleotide
  modified_base 84: mod_base = OTHER; note = 2'-O-methyl ribonucleotide
  modified_base 85: mod_base = OTHER; note = 2'-O-methyl ribonucleotide
  modified_base 86: mod_base = OTHER; note = 2'-O-methyl ribonucleotide
  modified_base 87: mod_base = OTHER; note = 2'-O-methyl ribonucleotide
  modified_base 89: mod_base = OTHER; note = 2'-O-methyl ribonucleotide
  modified_base 92: mod_base = OTHER; note = 2'-O-methyl ribonucleotide
  modified_base 93: mod_base = OTHER; note = 2'-O-methyl ribonucleotide
  modified_base 94: mod_base = OTHER; note = 2'-O-methyl ribonucleotide
  modified_base 95: mod_base = OTHER; note = 2'-O-methyl ribonucleotide
  modified_base 96: mod_base = OTHER; note = 2'-O-methyl ribonucleotide
  modified_base 97: mod_base = OTHER; note = 2'-O-methyl ribonucleotide
  modified_base 98: mod_base = OTHER; note = 2'-O-methyl ribonucleotide
  modified_base 99: mod_base = OTHER; note = 2'-O-methyl ribonucleotide
  modified_base 100: mod_base = OTHER; note = 2'-O-methyl ribonucleotide
  modified_base 101: mod_base = OTHER; note = uniform ribonucleotides (A, C, G, inosine or U), deoxynucleotides (A, G, C, inosine or T), ribonebularine, 2'-O-methylnebularine or deoxynebularine
  modified_base 102: mod_base = OTHER; note = uniform ribonucleotides (A, C, G, inosine or U), deoxynucleotides (A, G, C, inosine or T), ribonebularine, 2'-O-methylnebularine or deoxynebularine
  modified_base 103: mod_base = OTHER; note = uniform ribonucleotides (A, C, G, inosine or U), deoxynucleotides (A, G, C, inosine or T), ribonebularine, 2'-O-methylnebularine or deoxynebularine
  modified_base 1..3: mod_base = OTHER; note = phosphorothioate linkage
  modified_base 64..65: mod_base = OTHER; note = phosphorothioate linkage
  modified_base 97..100: mod_base = OTHER; note = phosphorothioate linkage
  misc_feature 1..100: note = RNA
  misc_feature 101..103: note = Optionally DNA or RNA

SEQ ID NO: 2909 - DNA, 103 bp, synthetic construct; identical to SEQ ID NO: 1797
  source 1..103: mol_type = other DNA
  modified_base 1: mod_base = OTHER; note = 2'-O-methyl ribonucleotide
  modified_base 2: mod_base = OTHER; note = 2'-O-methyl ribonucleotide
  modified_base 3: mod_base = OTHER; note = 2'-O-methyl ribonucleotide
  modified_base 21: mod_base = OTHER; note = 2'-O-methyl ribonucleotide
  modified_base 28: mod_base = OTHER; note = 2'-O-methyl ribonucleotide
  modified_base 29: mod_base = OTHER; note = 2'-O-methyl ribonucleotide
  modified_base 30: mod_base = OTHER; note = 2'-O-methyl ribonucleotide
  modified_base 31: mod_base = OTHER; note = 2'-O-methyl ribonucleotide
  modified_base 32: mod_base = OTHER; note = 2'-O-methyl ribonucleotide
  modified_base 34: mod_base = OTHER; note = 2'-O-methyl ribonucleotide
  modified_base 35: mod_base = OTHER; note = 2'-O-methyl ribonucleotide
  modified_base 36: mod_base = OTHER; note = 2'-O-methyl ribonucleotide
  modified_base 37: mod_base = OTHER; note = 2'-O-methyl ribonucleotide
  modified_base 38: mod_base = OTHER; note = 2'-O-methyl ribonucleotide
  modified_base 39: mod_base = OTHER; note = 2'-O-methyl ribonucleotide
  modified_base 40: mod_base = OTHER; note = 2'-O-methyl ribonucleotide
  modified_base 41: mod_base = OTHER; note = 2'-O-methyl ribonucleotide
  modified_base 42: mod_base = OTHER; note = 2'-O-methyl ribonucleotide
  modified_base 46: mod_base = OTHER; note = 2'-O-methyl ribonucleotide
  modified_base 48: mod_base = OTHER; note = 2'-O-methyl ribonucleotide
  modified_base 50: mod_base = OTHER; note = 2'-O-methyl ribonucleotide
  modified_base 52: mod_base = OTHER; note = 2'-O-methyl ribonucleotide
  modified_base 53: mod_base = OTHER; note = 2'-O-methyl ribonucleotide
  modified_base 54: mod_base = OTHER; note = 2'-O-methyl ribonucleotide
  modified_base 57: mod_base = OTHER; note = 2'-O-methyl ribonucleotide
  modified_base 61: mod_base = OTHER; note = 2'-O-methyl ribonucleotide
  modified_base 66: mod_base = OTHER; note = 2'-O-methyl ribonucleotide
  modified_base 67: mod_base = OTHER; note = 2'-O-methyl ribonucleotide
  modified_base 70: mod_base = OTHER; note = 2'-O-methyl ribonucleotide
  modified_base 71: mod_base = OTHER; note = 2'-O-methyl ribonucleotide
  modified_base 72: mod_base = OTHER; note = 2'-O-methyl ribonucleotide
  modified_base 73: mod_base = OTHER; note = 2'-O-methyl ribonucleotide
  modified_base 74: mod_base = OTHER; note = 2'-O-methyl ribonucleotide
  modified_base 75: mod_base = OTHER; note = 2'-O-methyl ribonucleotide
  modified_base 76: mod_base = OTHER; note = 2'-O-methyl ribonucleotide
  modified_base 77: mod_base = OTHER; note = 2'-O-methyl ribonucleotide
  modified_base 78: mod_base = OTHER; note = 2'-O-methyl ribonucleotide
  modified_base 79: mod_base = OTHER; note = 2'-O-methyl ribonucleotide
  modified_base 80: mod_base = OTHER; note = 2'-O-methyl ribonucleotide
  modified_base 82: mod_base = OTHER; note = 2'-O-methyl ribonucleotide
  modified_base 83: mod_base = OTHER; note = 2'-O-methyl ribonucleotide
  modified_base 84: mod_base = OTHER; note = 2'-O-methyl ribonucleotide
  modified_base 85: mod_base = OTHER; note = 2'-O-methyl ribonucleotide
  modified_base 86: mod_base = OTHER; note = 2'-O-methyl ribonucleotide
  modified_base 87: mod_base = OTHER; note = 2'-O-methyl ribonucleotide
  modified_base 89: mod_base = OTHER; note = 2'-O-methyl ribonucleotide
  modified_base 91: mod_base = OTHER; note = 2'-O-methyl ribonucleotide
  modified_base 92: mod_base = OTHER; note = 2'-O-methyl ribonucleotide
  modified_base 93: mod_base = OTHER; note = 2'-O-methyl ribonucleotide
  modified_base 94: mod_base = OTHER; note = 2'-O-methyl ribonucleotide
  modified_base 95: mod_base = OTHER; note = 2'-O-methyl ribonucleotide
  modified_base 96: mod_base = OTHER; note = 2'-O-methyl ribonucleotide
  modified_base 97: mod_base = OTHER; note = 2'-O-methyl ribonucleotide
  modified_base 98: mod_base = OTHER; note = 2'-O-methyl ribonucleotide
  modified_base 99: mod_base = OTHER; note = 2'-O-methyl ribonucleotide
  modified_base 100: mod_base = OTHER; note = 2'-O-methyl ribonucleotide
  modified_base 101: mod_base = OTHER; note = uniform ribonucleotides (A, C, G, inosine or U), deoxynucleotides (A, G, C, inosine or T), ribonebularine, 2'-O-methylnebularine or deoxynebularine
  modified_base 102: mod_base = OTHER; note = uniform ribonucleotides (A, C, G, inosine or U), deoxynucleotides (A, G, C, inosine or T), ribonebularine, 2'-O-methylnebularine or deoxynebularine
  modified_base 103: mod_base = OTHER; note = uniform ribonucleotides (A, C, G, inosine or U), deoxynucleotides (A, G, C, inosine or T), ribonebularine, 2'-O-methylnebularine or deoxynebularine
  modified_base 1..3: mod_base = OTHER; note = phosphorothioate linkage
  modified_base 64..65: mod_base = OTHER; note = phosphorothioate linkage
  modified_base 97..100: mod_base = OTHER; note = phosphorothioate linkage
  misc_feature 1..100: note = RNA
  misc_feature 101..103: note = Optionally DNA or RNA

SEQ ID NO: 2910 - DNA, 103 bp, synthetic construct; identical to SEQ ID NO: 1797
  source 1..103: mol_type = other DNA
  modified_base 1: mod_base = OTHER; note = 2'-O-methyl ribonucleotide
  modified_base 2: mod_base = OTHER; note = 2'-O-methyl ribonucleotide
  modified_base 3: mod_base = OTHER; note = 2'-O-methyl ribonucleotide
  modified_base 21: mod_base = OTHER; note = 2'-O-methyl ribonucleotide
  modified_base 28: mod_base = OTHER; note = 2'-O-methyl ribonucleotide
  modified_base 29: mod_base = OTHER; note = 2'-O-methyl ribonucleotide
  modified_base 30: mod_base = OTHER; note = 2'-O-methyl ribonucleotide
  modified_base 31: mod_base = OTHER; note = 2'-O-methyl ribonucleotide
  modified_base 32: mod_base = OTHER; note = 2'-O-methyl ribonucleotide
  modified_base 34: mod_base = OTHER; note = 2'-O-methyl ribonucleotide
  modified_base 35: mod_base = OTHER; note = 2'-O-methyl ribonucleotide
  modified_base 36: mod_base = OTHER; note = 2'-O-methyl ribonucleotide
  modified_base 37: mod_base = OTHER; note = 2'-O-methyl ribonucleotide
  modified_base 38: mod_base = OTHER; note = 2'-O-methyl ribonucleotide
  modified_base 39: mod_base = OTHER; note = 2'-O-methyl ribonucleotide
  modified_base 40: mod_base = OTHER; note = 2'-O-methyl ribonucleotide
  modified_base 41: mod_base = OTHER; note = 2'-O-methyl ribonucleotide
  modified_base 42: mod_base = OTHER; note = 2'-O-methyl ribonucleotide
  modified_base 46: mod_base = OTHER; note = 2'-O-methyl ribonucleotide
  modified_base 48: mod_base = OTHER; note = 2'-O-methyl ribonucleotide
  modified_base 50: mod_base = OTHER; note = 2'-O-methyl ribonucleotide
  modified_base 52: mod_base = OTHER; note = 2'-O-methyl ribonucleotide
  modified_base 53: mod_base = OTHER; note = 2'-O-methyl ribonucleotide
  modified_base 54: mod_base = OTHER; note = 2'-O-methyl ribonucleotide
  modified_base 55: mod_base = OTHER; note = 2'-O-methyl ribonucleotide
  modified_base 56: mod_base = OTHER; note = 2'-O-methyl ribonucleotide
  modified_base 57: mod_base = OTHER; note = 2'-O-methyl ribonucleotide
  modified_base 60: mod_base = OTHER; note = 2'-O-methyl ribonucleotide
  modified_base 61: mod_base = OTHER; note = 2'-O-methyl ribonucleotide
  modified_base 66: mod_base = OTHER; note = 2'-O-methyl ribonucleotide
  modified_base 67: mod_base = OTHER; note = 2'-O-methyl ribonucleotide
  modified_base 70: mod_base = OTHER; note = 2'-O-methyl ribonucleotide
  modified_base 71: mod_base = OTHER; note = 2'-O-methyl ribonucleotide
  modified_base 72: mod_base = OTHER; note = 2'-O-methyl ribonucleotide
  modified_base 74: mod_base = OTHER; note = 2'-O-methyl ribonucleotide
  modified_base 75: mod_base = OTHER; note = 2'-O-methyl ribonucleotide
  modified_base 76: mod_base = OTHER; note = 2'-O-methyl ribonucleotide
  modified_base 77: mod_base = OTHER; note = 2'-O-methyl ribonucleotide
  modified_base 78: mod_base = OTHER; note = 2'-O-methyl ribonucleotide
  modified_base 79: mod_base = OTHER; note = 2'-O-methyl ribonucleotide
  modified_base 80: mod_base = OTHER; note = 2'-O-methyl ribonucleotide
  modified_base 82: mod_base = OTHER; note = 2'-O-methyl ribonucleotide
  modified_base 83: mod_base = OTHER; note = 2'-O-methyl ribonucleotide
  modified_base 84: mod_base = OTHER; note = 2'-O-methyl ribonucleotide
  modified_base 85: mod_base = OTHER; note = 2'-O-methyl ribonucleotide
  modified_base 86: mod_base = OTHER; note = 2'-O-methyl ribonucleotide
  modified_base 87: mod_base = OTHER; note = 2'-O-methyl ribonucleotide
  modified_base 89: mod_base = OTHER; note = 2'-O-methyl ribonucleotide
  modified_base 92: mod_base = OTHER; note = 2'-O-methyl ribonucleotide
  modified_base 93: mod_base = OTHER; note = 2'-O-methyl ribonucleotide
  modified_base 94: mod_base = OTHER; note = 2'-O-methyl ribonucleotide
  modified_base 95: mod_base = OTHER; note = 2'-O-methyl ribonucleotide
  modified_base 96: mod_base = OTHER; note = 2'-O-methyl ribonucleotide
  modified_base 97: mod_base = OTHER; note = 2'-O-methyl ribonucleotide
  modified_base 98: mod_base = OTHER; note = 2'-O-methyl ribonucleotide
  modified_base 99: mod_base = OTHER; note = 2'-O-methyl ribonucleotide
  modified_base 100: mod_base = OTHER; note = 2'-O-methyl ribonucleotide
  modified_base 101: mod_base = OTHER; note = uniform ribonucleotides (A, C, G, inosine or U), deoxynucleotides (A, G, C, inosine or T), ribonebularine, 2'-O-methylnebularine or deoxynebularine
  modified_base 102: mod_base = OTHER; note = uniform ribonucleotides (A, C, G, inosine or U), deoxynucleotides (A, G, C, inosine or T), ribonebularine, 2'-O-methylnebularine or deoxynebularine
  modified_base 103: mod_base = OTHER; note = uniform ribonucleotides (A, C, G, inosine or U), deoxynucleotides (A, G, C, inosine or T), ribonebularine, 2'-O-methylnebularine or deoxynebularine
  modified_base 1..3: mod_base = OTHER; note = phosphorothioate linkage
  modified_base 64..65: mod_base = OTHER; note = phosphorothioate linkage
  modified_base 97..100: mod_base = OTHER; note = phosphorothioate linkage
  misc_feature 1..100: note = RNA
  misc_feature 101..103: note = Optionally DNA or RNA

SEQ ID NO: 2911 - DNA, 103 bp, synthetic construct; identical to SEQ ID NO: 1795
  source 1..103: mol_type = other DNA
  modified_base 1: mod_base = OTHER; note = 2'-O-methyl ribonucleotide
  modified_base 2: mod_base = OTHER; note = 2'-O-methyl ribonucleotide
  modified_base 3: mod_base = OTHER; note = 2'-O-methyl ribonucleotide
  modified_base 21: mod_base = OTHER; note = 2'-O-methyl ribonucleotide
  modified_base 28: mod_base = OTHER; note = 2'-O-methyl ribonucleotide
  modified_base 29: mod_base = OTHER; note = 2'-O-methyl ribonucleotide
  modified_base 30: mod_base = OTHER; note = 2'-O-methyl ribonucleotide
  modified_base 31: mod_base = OTHER; note = 2'-O-methyl ribonucleotide
  modified_base 32: mod_base = OTHER; note = 2'-O-methyl ribonucleotide
  modified_base 33: mod_base = OTHER; note = 2'-O-methyl ribonucleotide
  modified_base 34: mod_base = OTHER; note = 2'-O-methyl ribonucleotide
  modified_base 35: mod_base = OTHER; note = 2'-O-methyl ribonucleotide
  modified_base 36: mod_base = OTHER; note = 2'-O-methyl ribonucleotide
  modified_base 37: mod_base = OTHER; note = 2'-O-methyl ribonucleotide
  modified_base 38: mod_base = OTHER; note = 2'-O-methyl ribonucleotide
  modified_base 39: mod_base = OTHER; note = 2'-O-methyl ribonucleotide
  modified_base 40: mod_base = OTHER; note = 2'-O-methyl ribonucleotide
  modified_base 41: mod_base = OTHER; note = 2'-O-methyl ribonucleotide
  modified_base 42: mod_base = OTHER; note = 2'-O-methyl ribonucleotide
  modified_base 46: mod_base = OTHER; note = 2'-O-methyl ribonucleotide
  modified_base 48: mod_base = OTHER; note = 2'-O-methyl ribonucleotide
  modified_base 50: mod_base = OTHER; note = 2'-O-methyl ribonucleotide
  modified_base 52: mod_base = OTHER; note = 2'-O-methyl ribonucleotide
  modified_base 53: mod_base = OTHER; note = 2'-O-methyl ribonucleotide
  modified_base 54: mod_base = OTHER; note = 2'-O-methyl ribonucleotide
  modified_base 55: mod_base = OTHER; note = 2'-O-methyl ribonucleotide
  modified_base 56: mod_base = OTHER; note = 2'-O-methyl ribonucleotide
  modified_base 57: mod_base = OTHER; note = 2'-O-methyl ribonucleotide
  modified_base 60: mod_base = OTHER; note = 2'-O-methyl ribonucleotide
  modified_base 61: mod_base = OTHER; note = 2'-O-methyl ribonucleotide
  modified_base 66: mod_base = OTHER; note = 2'-O-methyl ribonucleotide
  modified_base 67: mod_base = OTHER; note = 2'-O-methyl ribonucleotide
  modified_base 70: mod_base = OTHER; note = 2'-O-methyl ribonucleotide
  modified_base 71: mod_base = OTHER; note = 2'-O-methyl ribonucleotide
  modified_base 72: mod_base = OTHER; note = 2'-O-methyl ribonucleotide
  modified_base 73: mod_base = OTHER; note = 2'-O-methyl ribonucleotide
  modified_base 74: mod_base = OTHER; note = 2'-O-methyl ribonucleotide
  modified_base 75: mod_base = OTHER; note = 2'-O-methyl ribonucleotide
  modified_base 76: mod_base = OTHER; note = 2'-O-methyl ribonucleotide
  modified_base 77: mod_base = OTHER; note = 2'-O-methyl ribonucleotide
  modified_base 78: mod_base = OTHER; note = 2'-O-methyl ribonucleotide
  modified_base 79: mod_base = OTHER; note = 2'-O-methyl ribonucleotide
  modified_base 80: mod_base = OTHER; note = 2'-O-methyl ribonucleotide
  modified_base 81: mod_base = OTHER; note = 2'-O-methyl ribonucleotide
  modified_base 83: mod_base = OTHER; note = 2'-O-methyl ribonucleotide
  modified_base 84: mod_base = OTHER; note = 2'-O-methyl ribonucleotide
  modified_base 85: mod_base = OTHER; note = 2'-O-methyl ribonucleotide
  modified_base 86: mod_base = OTHER; note = 2'-O-methyl ribonucleotide
  modified_base 87: mod_base = OTHER; note = 2'-O-methyl ribonucleotide
  modified_base 88: mod_base = OTHER; note = 2'-O-methyl ribonucleotide
  modified_base 89: mod_base = OTHER; note = 2'-O-methyl ribonucleotide
  modified_base 90: mod_base = OTHER; note = 2'-O-methyl ribonucleotide
  modified_base 91: mod_base = OTHER; note = 2'-O-methyl ribonucleotide
  modified_base 92: mod_base = OTHER; note = 2'-O-methyl ribonucleotide
  modified_base 93: mod_base = OTHER; note = 2'-O-methyl ribonucleotide
  modified_base 94: mod_base = OTHER; note = 2'-O-methyl ribonucleotide
  modified_base 95: mod_base = OTHER; note = 2'-O-methyl ribonucleotide
  modified_base 96: mod_base = OTHER; note = 2'-O-methyl ribonucleotide
  modified_base 97: mod_base = OTHER; note = 2'-O-methyl ribonucleotide
  modified_base 98: mod_base = OTHER; note = 2'-O-methyl ribonucleotide
  modified_base 99: mod_base = OTHER; note = 2'-O-methyl ribonucleotide
  modified_base 100: mod_base = OTHER; note = 2'-O-methyl ribonucleotide
  modified_base 101: mod_base = OTHER; note = uniform ribonucleotides (A, C, G, inosine or U), deoxynucleotides (A, G, C, inosine or T), ribonebularine, 2'-O-methylnebularine or deoxynebularine
  modified_base 102: mod_base = OTHER; note = uniform ribonucleotides (A, C, G, inosine or U), deoxynucleotides (A, G, C, inosine or T), ribonebularine, 2'-O-methylnebularine or deoxynebularine
  modified_base 103: mod_base = OTHER; note = uniform ribonucleotides (A, C, G, inosine or U), deoxynucleotides (A, G, C, inosine or T), ribonebularine, 2'-O-methylnebularine or deoxynebularine
  modified_base 1..3: mod_base = OTHER; note = phosphorothioate linkage
  modified_base 45..46: mod_base = OTHER; note = phosphorothioate linkage
  modified_base 97..100: mod_base = OTHER; note = phosphorothioate linkage
  misc_feature 1..100: note = RNA
  misc_feature 101..103: note = Optionally DNA or RNA

SEQ ID NO: 2912 - DNA, 103 bp, synthetic construct; identical to SEQ ID NO: 1795
  source 1..103: mol_type = other DNA
  modified_base 1: mod_base = OTHER; note = 2'-O-methyl ribonucleotide
  modified_base 2: mod_base = OTHER; note = 2'-O-methyl ribonucleotide
  modified_base 3: mod_base = OTHER; note = 2'-O-methyl ribonucleotide
  modified_base 21: mod_base = OTHER; note = 2'-O-methyl ribonucleotide
  modified_base 28: mod_base = OTHER; note = 2'-O-methyl ribonucleotide
  modified_base 29: mod_base = OTHER; note = 2'-O-methyl ribonucleotide
  modified_base 30: mod_base = OTHER; note = 2'-O-methyl ribonucleotide
  modified_base 31: mod_base = OTHER; note = 2'-O-methyl ribonucleotide
  modified_base 32: mod_base = OTHER; note = 2'-O-methyl ribonucleotide
  modified_base 34: mod_base = OTHER; note = 2'-O-methyl ribonucleotide
  modified_base 35: mod_base = OTHER; note = 2'-O-methyl ribonucleotide
  modified_base 36: mod_base = OTHER; note = 2'-O-methyl ribonucleotide
  modified_base 37: mod_base = OTHER; note = 2'-O-methyl ribonucleotide
  modified_base 38: mod_base = OTHER; note = 2'-O-methyl ribonucleotide
  modified_base 39: mod_base = OTHER; note = 2'-O-methyl ribonucleotide
  modified_base 40: mod_base = OTHER; note = 2'-O-methyl ribonucleotide
  modified_base 41: mod_base = OTHER; note = 2'-O-methyl ribonucleotide
  modified_base 42: mod_base = OTHER; note = 2'-O-methyl ribonucleotide
  modified_base 46: mod_base = OTHER; note = 2'-O-methyl ribonucleotide
  modified_base 48: mod_base = OTHER; note = 2'-O-methyl ribonucleotide
  modified_base 50: mod_base = OTHER; note = 2'-O-methyl ribonucleotide
  modified_base 52: mod_base = OTHER; note = 2'-O-methyl ribonucleotide
  modified_base 53: mod_base = OTHER; note = 2'-O-methyl ribonucleotide
  modified_base 54: mod_base = OTHER; note = 2'-O-methyl ribonucleotide
  modified_base 55: mod_base = OTHER; note = 2'-O-methyl ribonucleotide
  modified_base 56: mod_base = OTHER; note = 2'-O-methyl ribonucleotide
  modified_base 57: mod_base = OTHER; note = 2'-O-methyl ribonucleotide
  modified_base 60: mod_base = OTHER; note = 2'-O-methyl ribonucleotide
  modified_base 61: mod_base = OTHER; note = 2'-O-methyl ribonucleotide
  modified_base 66: mod_base = OTHER; note = 2'-O-methyl ribonucleotide
  modified_base 67: mod_base = OTHER; note = 2'-O-methyl ribonucleotide
  modified_base 70: mod_base = OTHER; note = 2'-O-methyl ribonucleotide
  modified_base 71: mod_base = OTHER; note = 2'-O-methyl ribonucleotide
  modified_base 72: mod_base = OTHER; note = 2'-O-methyl ribonucleotide
  modified_base 74: mod_base = OTHER; note = 2'-O-methyl ribonucleotide
  modified_base 75: mod_base = OTHER; note = 2'-O-methyl ribonucleotide
  modified_base 76: mod_base = OTHER; note = 2'-O-methyl ribonucleotide
  modified_base 77: mod_base = OTHER; note = 2'-O-methyl ribonucleotide
  modified_base 78: mod_base = OTHER; note = 2'-O-methyl ribonucleotide
  modified_base 79: mod_base = OTHER; note = 2'-O-methyl ribonucleotide
  modified_base 80: mod_base = OTHER; note = 2'-O-methyl ribonucleotide
  modified_base 81: mod_base = OTHER; note = 2'-O-methyl ribonucleotide
  modified_base 83: mod_base = OTHER; note = 2'-O-methyl ribonucleotide
  modified_base 84: mod_base = OTHER; note = 2'-O-methyl ribonucleotide
  modified_base 85: mod_base = OTHER; note = 2'-O-methyl ribonucleotide
  modified_base 86: mod_base = OTHER; note = 2'-O-methyl ribonucleotide
  modified_base 87: mod_base = OTHER; note = 2'-O-methyl ribonucleotide
  modified_base 88: mod_base = OTHER; note = 2'-O-methyl ribonucleotide
  modified_base 89: mod_base = OTHER; note = 2'-O-methyl ribonucleotide
  modified_base 90: mod_base = OTHER; note = 2'-O-methyl ribonucleotide
  modified_base 91: mod_base = OTHER; note = 2'-O-methyl ribonucleotide
  modified_base 92: mod_base = OTHER; note = 2'-O-methyl ribonucleotide
  modified_base 93: mod_base = OTHER; note = 2'-O-methyl ribonucleotide
  modified_base 94: mod_base = OTHER; note = 2'-O-methyl ribonucleotide
  modified_base 95: mod_base = OTHER; note = 2'-O-methyl ribonucleotide
  modified_base 96: mod_base = OTHER; note = 2'-O-methyl ribonucleotide
  modified_base 97: mod_base = OTHER; note = 2'-O-methyl ribonucleotide
  modified_base 98: mod_base = OTHER; note = 2'-O-methyl ribonucleotide
  modified_base 99: mod_base = OTHER; note = 2'-O-methyl ribonucleotide
  modified_base 100: mod_base = OTHER; note = 2'-O-methyl ribonucleotide
  modified_base 101: mod_base = OTHER; note = uniform ribonucleotides (A, C, G, inosine or U), deoxynucleotides (A, G, C, inosine or T), ribonebularine, 2'-O-methylnebularine or deoxynebularine
  modified_base 102: mod_base = OTHER; note = uniform ribonucleotides (A, C, G, inosine or U), deoxynucleotides (A, G, C, inosine or T), ribonebularine, 2'-O-methylnebularine or deoxynebularine
  modified_base 103: mod_base = OTHER; note = uniform ribonucleotides (A, C, G, inosine or U), deoxynucleotides (A, G, C, inosine or T), ribonebularine, 2'-O-methylnebularine or deoxynebularine
  modified_base 1..3: mod_base = OTHER; note = phosphorothioate linkage
  modified_base 45..46: mod_base = OTHER; note = phosphorothioate linkage
  modified_base 97..100: mod_base = OTHER; note = phosphorothioate linkage
  misc_feature 1..100: note = RNA
  misc_feature 101..103: note = Optionally DNA or RNA

SEQ ID NO: 2913 - DNA, 103 bp, synthetic construct; identical to SEQ ID NO: 1796
  source 1..103: mol_type = other DNA
  modified_base 1: mod_base = OTHER; note = 2'-O-methyl ribonucleotide
  modified_base 2: mod_base = OTHER; note = 2'-O-methyl ribonucleotide
  modified_base 3: mod_base = OTHER; note = 2'-O-methyl ribonucleotide
  modified_base 21: mod_base = OTHER; note = 2'-O-methyl ribonucleotide
  modified_base 28: mod_base = OTHER; note = 2'-O-methyl ribonucleotide
  modified_base 29: mod_base = OTHER; note = 2'-O-methyl ribonucleotide
  modified_base 30: mod_base = OTHER; note = 2'-O-methyl ribonucleotide
  modified_base 31: mod_base = OTHER; note = 2'-O-methyl ribonucleotide
  modified_base 32: mod_base = OTHER; note = 2'-O-methyl ribonucleotide
  modified_base 33: mod_base = OTHER; note = 2'-O-methyl ribonucleotide
  modified_base 34: mod_base = OTHER; note = 2'-O-methyl ribonucleotide
  modified_base 35: mod_base = OTHER; note = 2'-O-methyl ribonucleotide
  modified_base 36: mod_base = OTHER; note = 2'-O-methyl ribonucleotide
  modified_base 37: mod_base = OTHER; note = 2'-O-methyl ribonucleotide
  modified_base 38: mod_base = OTHER; note = 2'-O-methyl ribonucleotide
  modified_base 39: mod_base = OTHER; note = 2'-O-methyl ribonucleotide
  modified_base 40: mod_base = OTHER; note = 2'-O-methyl ribonucleotide
  modified_base 41: mod_base = OTHER; note = 2'-O-methyl ribonucleotide
  modified_base 42: mod_base = OTHER; note = 2'-O-methyl ribonucleotide
  modified_base 46: mod_base = OTHER; note = 2'-O-methyl ribonucleotide
  modified_base 48: mod_base = OTHER; note = 2'-O-methyl ribonucleotide
  modified_base 50: mod_base = OTHER; note = 2'-O-methyl ribonucleotide
  modified_base 52: mod_base = OTHER; note = 2'-O-methyl ribonucleotide
  modified_base 53: mod_base = OTHER; note = 2'-O-methyl ribonucleotide
  modified_base 54: mod_base = OTHER; note = 2'-O-methyl ribonucleotide
  modified_base 55: mod_base = OTHER; note = 2'-O-methyl ribonucleotide
  modified_base 56: mod_base = OTHER; note = 2'-O-methyl ribonucleotide
  modified_base 57: mod_base = OTHER; note = 2'-O-methyl ribonucleotide
  modified_base 60: mod_base = OTHER; note = 2'-O-methyl ribonucleotide
  modified_base 61: mod_base = OTHER; note = 2'-O-methyl ribonucleotide
  modified_base 66: mod_base = OTHER; note = 2'-O-methyl ribonucleotide
  modified_base 67: mod_base = OTHER; note = 2'-O-methyl ribonucleotide
  modified_base 70: mod_base = OTHER; note = 2'-O-methyl ribonucleotide
  modified_base 71: mod_base = OTHER; note = 2'-O-methyl ribonucleotide
  modified_base 72: mod_base = OTHER; note = 2'-O-methyl ribonucleotide
  modified_base 73: mod_base = OTHER; note = 2'-O-methyl ribonucleotide
  modified_base 74: mod_base = OTHER; note = 2'-O-methyl ribonucleotide
  modified_base 75: mod_base = OTHER; note = 2'-O-methyl ribonucleotide
  modified_base 76: mod_base = OTHER; note = 2'-O-methyl ribonucleotide
  modified_base 77: mod_base = OTHER; note = 2'-O-methyl ribonucleotide
  modified_base 78: mod_base = OTHER; note = 2'-O-methyl ribonucleotide
  modified_base 79: mod_base = OTHER; note = 2'-O-methyl ribonucleotide
  modified_base 80: mod_base = OTHER; note = 2'-O-methyl ribonucleotide
  modified_base 81: mod_base = OTHER; note = 2'-O-methyl ribonucleotide
  modified_base 83: mod_base = OTHER; note = 2'-O-methyl ribonucleotide
  modified_base 84: mod_base = OTHER; note = 2'-O-methyl ribonucleotide
  modified_base 85: mod_base = OTHER; note = 2'-O-methyl ribonucleotide
  modified_base 86: mod_base = OTHER; note = 2'-O-methyl ribonucleotide
  modified_base 87: mod_base = OTHER; note = 2'-O-methyl ribonucleotide
  modified_base 88: mod_base = OTHER; note = 2'-O-methyl ribonucleotide
  modified_base 89: mod_base = OTHER; note = 2'-O-methyl ribonucleotide
  modified_base 90: mod_base = OTHER; note = 2'-O-methyl ribonucleotide
  modified_base 91: mod_base = OTHER; note = 2'-O-methyl ribonucleotide
  modified_base 92: mod_base = OTHER; note = 2'-O-methyl ribonucleotide
  modified_base 93: mod_base = OTHER; note = 2'-O-methyl ribonucleotide
  modified_base 94: mod_base = OTHER; note = 2'-O-methyl ribonucleotide
  modified_base 95: mod_base = OTHER; note = 2'-O-methyl ribonucleotide
  modified_base 96: mod_base = OTHER; note = 2'-O-methyl ribonucleotide
  modified_base 97: mod_base = OTHER; note = 2'-O-methyl ribonucleotide
  modified_base 98: mod_base = OTHER; note = 2'-O-methyl ribonucleotide
  modified_base 99: mod_base = OTHER; note = 2'-O-methyl ribonucleotide
  modified_base 100: mod_base = OTHER; note = 2'-O-methyl ribonucleotide
  modified_base 101: mod_base = OTHER; note = uniform ribonucleotides (A, C, G, inosine or U), deoxynucleotides (A, G, C, inosine or T), ribonebularine, 2'-O-methylnebularine or deoxynebularine
  modified_base 102: mod_base = OTHER; note = uniform ribonucleotides (A, C, G, inosine or U), deoxynucleotides (A, G, C, inosine or T), ribonebularine, 2'-O-methylnebularine or deoxynebularine
  modified_base 103: mod_base = OTHER; note = uniform ribonucleotides (A, C, G, inosine or U), deoxynucleotides (A, G, C, inosine or T), ribonebularine, 2'-O-methylnebularine or deoxynebularine
  modified_base 1..3: mod_base = OTHER; note = phosphorothioate linkage
  modified_base 45..46: mod_base = OTHER; note = phosphorothioate linkage
  modified_base 97..100: mod_base = OTHER; note = phosphorothioate linkage
  misc_feature 1..100: note = RNA
  misc_feature 101..103: note = Optionally DNA or RNA

SEQ ID NO: 2914 - DNA, 103 bp, synthetic construct; identical to SEQ ID NO: 1796
  source 1..103: mol_type = other DNA
  modified_base 1: mod_base = OTHER; note = 2'-O-methyl ribonucleotide
  modified_base 2: mod_base = OTHER; note = 2'-O-methyl ribonucleotide
  modified_base 3: mod_base = OTHER; note = 2'-O-methyl ribonucleotide
  modified_base 21: mod_base = OTHER; note = 2'-O-methyl ribonucleotide
  modified_base 28: mod_base = OTHER; note = 2'-O-methyl ribonucleotide
  modified_base 29: mod_base = OTHER; note = 2'-O-methyl ribonucleotide
  modified_base 30: mod_base = OTHER; note = 2'-O-methyl ribonucleotide
  modified_base 31: mod_base = OTHER; note = 2'-O-methyl ribonucleotide
  modified_base 32: mod_base = OTHER; note = 2'-O-methyl ribonucleotide
  modified_base 34: mod_base = OTHER; note = 2'-O-methyl ribonucleotide
  modified_base 35: mod_base = OTHER; note = 2'-O-methyl ribonucleotide
  modified_base 36: mod_base = OTHER; note = 2'-O-methyl ribonucleotide
  modified_base 37: mod_base = OTHER; note = 2'-O-methyl ribonucleotide
  modified_base 38: mod_base = OTHER; note = 2'-O-methyl ribonucleotide
  modified_base 39: mod_base = OTHER; note = 2'-O-methyl ribonucleotide
  modified_base 40: mod_base = OTHER; note = 2'-O-methyl ribonucleotide
  modified_base 41: mod_base = OTHER; note = 2'-O-methyl ribonucleotide
  modified_base 42: mod_base = OTHER; note = 2'-O-methyl ribonucleotide
  modified_base 46: mod_base = OTHER; note = 2'-O-methyl ribonucleotide
  modified_base 48: mod_base = OTHER; note = 2'-O-methyl ribonucleotide
  modified_base 50: mod_base = OTHER; note = 2'-O-methyl ribonucleotide
  modified_base 52: mod_base = OTHER; note = 2'-O-methyl ribonucleotide
  modified_base 53: mod_base = OTHER; note = 2'-O-methyl ribonucleotide
  modified_base 54: mod_base = OTHER; note = 2'-O-methyl ribonucleotide
  modified_base 55: mod_base = OTHER; note = 2'-O-methyl ribonucleotide
  modified_base 56: mod_base = OTHER; note = 2'-O-methyl ribonucleotide
  modified_base 57: mod_base = OTHER; note = 2'-O-methyl ribonucleotide
  modified_base 60: mod_base = OTHER; note = 2'-O-methyl ribonucleotide
  modified_base 61: mod_base = OTHER; note = 2'-O-methyl ribonucleotide
  modified_base 66: mod_base = OTHER; note = 2'-O-methyl ribonucleotide
  modified_base 67: mod_base = OTHER; note = 2'-O-methyl ribonucleotide
  modified_base 70: mod_base = OTHER; note = 2'-O-methyl ribonucleotide
  modified_base 71: mod_base = OTHER; note = 2'-O-methyl ribonucleotide
  modified_base 72: mod_base = OTHER; note = 2'-O-methyl ribonucleotide
  modified_base 74: mod_base = OTHER; note = 2'-O-methyl ribonucleotide
  modified_base 75: mod_base = OTHER; note = 2'-O-methyl ribonucleotide
  modified_base 76: mod_base = OTHER; note = 2'-O-methyl ribonucleotide
  modified_base 77: mod_base = OTHER; note = 2'-O-methyl ribonucleotide
  modified_base 78: mod_base = OTHER; note = 2'-O-methyl ribonucleotide
  modified_base 79: mod_base = OTHER; note = 2'-O-methyl ribonucleotide
  modified_base 80: mod_base = OTHER; note = 2'-O-methyl ribonucleotide
  modified_base 81: mod_base = OTHER; note = 2'-O-methyl ribonucleotide
  modified_base 83: mod_base = OTHER; note = 2'-O-methyl ribonucleotide
  modified_base 84: mod_base = OTHER; note = 2'-O-methyl ribonucleotide
  modified_base 85: mod_base = OTHER; note = 2'-O-methyl ribonucleotide
  modified_base 86: mod_base = OTHER; note = 2'-O-methyl ribonucleotide
  modified_base 87: mod_base = OTHER; note = 2'-O-methyl ribonucleotide
  modified_base 88: mod_base = OTHER; note = 2'-O-methyl ribonucleotide
  modified_base 89: mod_base = OTHER; note = 2'-O-methyl ribonucleotide
  modified_base 90: mod_base = OTHER; note = 2'-O-methyl ribonucleotide
  modified_base 91: mod_base = OTHER; note = 2'-O-methyl ribonucleotide
  modified_base 92: mod_base = OTHER; note = 2'-O-methyl ribonucleotide
  modified_base 93: mod_base = OTHER; note = 2'-O-methyl ribonucleotide
  modified_base 94: mod_base = OTHER; note = 2'-O-methyl ribonucleotide
  modified_base 95: mod_base = OTHER; note = 2'-O-methyl ribonucleotide
  modified_base 96: mod_base = OTHER; note = 2'-O-methyl ribonucleotide
  modified_base 97: mod_base = OTHER; note = 2'-O-methyl ribonucleotide
  modified_base 98: mod_base = OTHER; note = 2'-O-methyl ribonucleotide
  modified_base 99: mod_base = OTHER; note = 2'-O-methyl ribonucleotide
  modified_base 100: mod_base = OTHER; note = 2'-O-methyl ribonucleotide
  modified_base 101: mod_base = OTHER; note = uniform ribonucleotides (A, C, G, inosine or U), deoxynucleotides (A, G, C, inosine or T), ribonebularine, 2'-O-methylnebularine or deoxynebularine
  modified_base 102: mod_base = OTHER; note = uniform ribonucleotides (A, C, G, inosine or U), deoxynucleotides (A, G, C, inosine or T), ribonebularine, 2'-O-methylnebularine or deoxynebularine
  modified_base 103: mod_base = OTHER; note = uniform ribonucleotides (A, C, G, inosine or U), deoxynucleotides (A, G, C, inosine or T), ribonebularine, 2'-O-methylnebularine or deoxynebularine
  modified_base 1..3: mod_base = OTHER; note = phosphorothioate linkage
  modified_base 45..46: mod_base = OTHER; note = phosphorothioate linkage
  modified_base 97..100: mod_base = OTHER; note = phosphorothioate linkage
  misc_feature 1..100: note = RNA
  misc_feature 101..103: note = Optionally DNA or RNA

SEQ ID NO: 2915 - DNA, 103 bp, synthetic construct; identical to SEQ ID NO: 1797
  source 1..103: mol_type = other DNA
  modified_base 1: mod_base = OTHER; note = 2'-O-methyl ribonucleotide
  modified_base 2: mod_base = OTHER; note = 2'-O-methyl ribonucleotide
  modified_base 3: mod_base = OTHER; note = 2'-O-methyl ribonucleotide
  modified_base 21: mod_base = OTHER; note = 2'-O-methyl ribonucleotide
  modified_base 28: mod_base = OTHER; note = 2'-O-methyl ribonucleotide
  modified_base 29: mod_base = OTHER; note = 2'-O-methyl ribonucleotide
  modified_base 30: mod_base = OTHER; note = 2'-O-methyl ribonucleotide
  modified_base 31: mod_base = OTHER; note = 2'-O-methyl ribonucleotide
  modified_base 32: mod_base = OTHER; note = 2'-O-methyl ribonucleotide
  modified_base 33: mod_base = OTHER; note = 2'-O-methyl ribonucleotide
  modified_base 34: mod_base = OTHER; note = 2'-O-methyl ribonucleotide
  modified_base 35: mod_base = OTHER; note = 2'-O-methyl ribonucleotide
  modified_base 36: mod_base = OTHER; note = 2'-O-methyl ribonucleotide
  modified_base 37: mod_base = OTHER; note = 2'-O-methyl ribonucleotide
  modified_base 38: mod_base = OTHER; note = 2'-O-methyl ribonucleotide
  modified_base 39: mod_base = OTHER; note = 2'-O-methyl ribonucleotide
  modified_base 40: mod_base = OTHER; note = 2'-O-methyl ribonucleotide
  modified_base 41: mod_base = OTHER; note = 2'-O-methyl ribonucleotide
  modified_base 42: mod_base = OTHER; note = 2'-O-methyl ribonucleotide
  modified_base 46: mod_base = OTHER; note = 2'-O-methyl ribonucleotide
  modified_base 48: mod_base = OTHER; note = 2'-O-methyl ribonucleotide
  modified_base 50: mod_base = OTHER; note = 2'-O-methyl ribonucleotide
  modified_base 52: mod_base = OTHER; note = 2'-O-methyl ribonucleotide
  modified_base 53: mod_base = OTHER; note = 2'-O-methyl ribonucleotide
  modified_base 54: mod_base = OTHER; note = 2'-O-methyl ribonucleotide
  modified_base 57: mod_base = OTHER; note = 2'-O-methyl ribonucleotide
  modified_base 61: mod_base = OTHER; note = 2'-O-methyl ribonucleotide
  modified_base 66: mod_base = OTHER; note = 2'-O-methyl ribonucleotide
  modified_base 67: mod_base = OTHER; note = 2'-O-methyl ribonucleotide
  modified_base 70: mod_base = OTHER; note = 2'-O-methyl ribonucleotide
  modified_base 71: mod_base = OTHER; note = 2'-O-methyl ribonucleotide
  modified_base 72: mod_base = OTHER; note = 2'-O-methyl ribonucleotide
  modified_base 74: mod_base = OTHER; note = 2'-O-methyl ribonucleotide
  modified_base 75: mod_base = OTHER; note = 2'-O-methyl ribonucleotide
  modified_base 76: mod_base = OTHER; note = 2'-O-methyl ribonucleotide
  modified_base 77: mod_base = OTHER; note = 2'-O-methyl ribonucleotide
  modified_base 78: mod_base = OTHER; note = 2'-O-methyl ribonucleotide
  modified_base 79: mod_base = OTHER; note = 2'-O-methyl ribonucleotide
  modified_base 80: mod_base = OTHER; note = 2'-O-methyl ribonucleotide
  modified_base 82: mod_base = OTHER; note = 2'-O-methyl ribonucleotide
  modified_base 83: mod_base = OTHER; note = 2'-O-methyl ribonucleotide
  modified_base 84: mod_base = OTHER; note = 2'-O-methyl ribonucleotide
  modified_base 85: mod_base = OTHER; note = 2'-O-methyl ribonucleotide
  modified_base 86: mod_base = OTHER; note = 2'-O-methyl ribonucleotide
  modified_base 87: mod_base = OTHER; note = 2'-O-methyl ribonucleotide
  modified_base 89: mod_base = OTHER; note = 2'-O-methyl ribonucleotide
  modified_base 92: mod_base = OTHER; note = 2'-O-methyl ribonucleotide
  modified_base 93: mod_base = OTHER; note = 2'-O-methyl ribonucleotide
  modified_base 94: mod_base = OTHER; note = 2'-O-methyl ribonucleotide
  modified_base 95: mod_base = OTHER; note = 2'-O-methyl ribonucleotide
  modified_base 96: mod_base = OTHER; note = 2'-O-methyl ribonucleotide
  modified_base 97: mod_base = OTHER; note = 2'-O-methyl ribonucleotide
  modified_base 98: mod_base = OTHER; note = 2'-O-methyl ribonucleotide
  modified_base 99: mod_base = OTHER; note = 2'-O-methyl ribonucleotide
  modified_base 100: mod_base = OTHER; note = 2'-O-methyl ribonucleotide
  modified_base 101: mod_base = OTHER; note = uniform ribonucleotides (A, C, G, inosine or U), deoxynucleotides (A, G, C, inosine or T), ribonebularine, 2'-O-methylnebularine or deoxynebularine
  modified_base 102: mod_base = OTHER; note = uniform ribonucleotides (A, C, G, inosine or U), deoxynucleotides (A, G, C, inosine or T), ribonebularine, 2'-O-methylnebularine or deoxynebularine
  modified_base 103: mod_base = OTHER; note = uniform ribonucleotides (A, C, G, inosine or U), deoxynucleotides (A, G, C, inosine or T), ribonebularine, 2'-O-methylnebularine or deoxynebularine
  modified_base 1..3: mod_base = OTHER; note = phosphorothioate linkage
  modified_base 45..46: mod_base = OTHER; note = phosphorothioate linkage
  modified_base 97..100: mod_base = OTHER; note = phosphorothioate linkage
  misc_feature 1..100: note = RNA
  misc_feature 101..103: note = Optionally DNA or RNA

SEQ ID NO: 2916 - DNA, 103 bp, synthetic construct; identical to SEQ ID NO: 1797
  source 1..103: mol_type = other DNA
  modified_base 1: mod_base = OTHER; note = 2'-O-methyl ribonucleotide
  modified_base 2: mod_base = OTHER; note = 2'-O-methyl ribonucleotide
  modified_base 3: mod_base = OTHER; note = 2'-O-methyl ribonucleotide
  modified_base 21: mod_base = OTHER; note = 2'-O-methyl ribonucleotide
  modified_base 28: mod_base = OTHER; note = 2'-O-methyl ribonucleotide
  modified_base 29: mod_base = OTHER; note = 2'-O-methyl ribonucleotide
  modified_base 30: mod_base = OTHER; note = 2'-O-methyl ribonucleotide
  modified_base 31: mod_base = OTHER; note = 2'-O-methyl ribonucleotide
  modified_base 32: mod_base = OTHER; note = 2'-O-methyl ribonucleotide
  modified_base 33: mod_base = OTHER; note = 2'-O-methyl ribonucleotide
  modified_base 34: mod_base = OTHER; note = 2'-O-methyl ribonucleotide
  modified_base 35: mod_base = OTHER; note = 2'-O-methyl ribonucleotide
  modified_base 36: mod_base = OTHER; note = 2'-O-methyl ribonucleotide
  modified_base 37: mod_base = OTHER; note = 2'-O-methyl ribonucleotide
  modified_base 38: mod_base = OTHER; note = 2'-O-methyl ribonucleotide
  modified_base 39: mod_base = OTHER; note = 2'-O-methyl ribonucleotide
  modified_base 40: mod_base = OTHER; note = 2'-O-methyl ribonucleotide
  modified_base 41: mod_base = OTHER; note = 2'-O-methyl ribonucleotide
  modified_base 42: mod_base = OTHER; note = 2'-O-methyl ribonucleotide
  modified_base 46: mod_base = OTHER; note = 2'-O-methyl ribonucleotide
  modified_base 48: mod_base = OTHER; note = 2'-O-methyl ribonucleotide
  modified_base 50: mod_base = OTHER; note = 2'-O-methyl ribonucleotide
  modified_base 52: mod_base = OTHER; note = 2'-O-methyl ribonucleotide
  modified_base 53: mod_base = OTHER; note = 2'-O-methyl ribonucleotide
  modified_base 54: mod_base = OTHER; note = 2'-O-methyl ribonucleotide
  modified_base 55: mod_base = OTHER; note = 2'-O-methyl ribonucleotide
  modified_base 56: mod_base = OTHER; note = 2'-O-methyl ribonucleotide
  modified_base 57: mod_base = OTHER; note = 2'-O-methyl ribonucleotide
  modified_base 60: mod_base = OTHER; note = 2'-O-methyl ribonucleotide
  modified_base 61: mod_base = OTHER; note = 2'-O-methyl ribonucleotide
  modified_base 66: mod_base = OTHER; note = 2'-O-methyl ribonucleotide
  modified_base 67: mod_base = OTHER; note = 2'-O-methyl ribonucleotide
  modified_base 70: mod_base = OTHER; note = 2'-O-methyl ribonucleotide
  modified_base 71: mod_base = OTHER; note = 2'-O-methyl ribonucleotide
  modified_base 72: mod_base = OTHER; note = 2'-O-methyl ribonucleotide
  modified_base 74: mod_base = OTHER; note = 2'-O-methyl ribonucleotide
  modified_base 75: mod_base = OTHER; note = 2'-O-methyl ribonucleotide
  modified_base 76: mod_base = OTHER; note = 2'-O-methyl ribonucleotide
  modified_base 77: mod_base = OTHER; note = 2'-O-methyl ribonucleotide
  modified_base 78: mod_base = OTHER; note = 2'-O-methyl ribonucleotide
  modified_base 79: mod_base = OTHER; note = 2'-O-methyl ribonucleotide
  modified_base 80: mod_base = OTHER; note = 2'-O-methyl ribonucleotide
  modified_base 82: mod_base = OTHER; note = 2'-O-methyl ribonucleotide
  modified_base 83: mod_base = OTHER; note = 2'-O-methyl ribonucleotide
  modified_base 84: mod_base = OTHER; note = 2'-O-methyl ribonucleotide
  modified_base 85: mod_base = OTHER; note = 2'-O-methyl ribonucleotide
  modified_base 86: mod_base = OTHER; note = 2'-O-methyl ribonucleotide
  modified_base 87: mod_base = OTHER; note = 2'-O-methyl ribonucleotide
  modified_base 89: mod_base = OTHER; note = 2'-O-methyl ribonucleotide
  modified_base 92: mod_base = OTHER; note = 2'-O-methyl ribonucleotide
  modified_base 93: mod_base = OTHER; note = 2'-O-methyl ribonucleotide
  modified_base 94: mod_base = OTHER; note = 2'-O-methyl ribonucleotide
  modified_base 95: mod_base = OTHER; note = 2'-O-methyl ribonucleotide
  modified_base 96: mod_base = OTHER; note = 2'-O-methyl ribonucleotide
  modified_base 97: mod_base = OTHER; note = 2'-O-methyl ribonucleotide
  modified_base 98: mod_base = OTHER; note = 2'-O-methyl ribonucleotide
  modified_base 99: mod_base = OTHER; note = 2'-O-methyl ribonucleotide
  modified_base 100: mod_base = OTHER; note = 2'-O-methyl ribonucleotide
  modified_base 101: mod_base = OTHER; note = uniform ribonucleotides (A, C, G, inosine or U), deoxynucleotides (A, G, C, inosine or T), ribonebularine, 2'-O-methylnebularine or deoxynebularine
  modified_base 102: mod_base = OTHER; note = uniform ribonucleotides (A, C, G, inosine or U), deoxynucleotides (A, G, C, inosine or T), ribonebularine, 2'-O-methylnebularine or deoxynebularine
  modified_base 103: mod_base = OTHER; note = uniform ribonucleotides (A, C, G, inosine or U), deoxynucleotides (A, G, C, inosine or T), ribonebularine, 2'-O-methylnebularine or deoxynebularine
  modified_base 1..3: mod_base = OTHER; note = phosphorothioate linkage
  modified_base 45..46: mod_base = OTHER; note = phosphorothioate linkage
  modified_base 97..100: mod_base = OTHER; note = phosphorothioate linkage
  misc_feature 1..100: note = RNA
  misc_feature 101..103: note = Optionally DNA or RNA

SEQ ID NO: 2917 - DNA, 103 bp, synthetic construct; identical to SEQ ID NO: 1797
  source 1..103: mol_type = other DNA
  modified_base 1: mod_base = OTHER; note = 2'-O-methyl ribonucleotide
  modified_base 2: mod_base = OTHER; note = 2'-O-methyl ribonucleotide
  modified_base 3: mod_base = OTHER; note = 2'-O-methyl ribonucleotide
  modified_base 21: mod_base = OTHER; note = 2'-O-methyl ribonucleotide
  modified_base 28: mod_base = OTHER; note = 2'-O-methyl ribonucleotide
  modified_base 29: mod_base = OTHER; note = 2'-O-methyl ribonucleotide
  modified_base 30: mod_base = OTHER; note = 2'-O-methyl ribonucleotide
  modified_base 31: mod_base = OTHER; note = 2'-O-methyl ribonucleotide
  modified_base 32: mod_base = OTHER; note = 2'-O-methyl ribonucleotide
  modified_base 33: mod_base = OTHER; note = 2'-O-methyl ribonucleotide
  modified_base 34: mod_base = OTHER; note = 2'-O-methyl ribonucleotide
  modified_base 35: mod_base = OTHER; note = 2'-O-methyl ribonucleotide
  modified_base 36: mod_base = OTHER; note = 2'-O-methyl ribonucleotide
  modified_base 37: mod_base = OTHER; note = 2'-O-methyl ribonucleotide
  modified_base 38: mod_base = OTHER; note = 2'-O-methyl ribonucleotide
  modified_base 39: mod_base = OTHER; note = 2'-O-methyl ribonucleotide
  modified_base 40: mod_base = OTHER; note = 2'-O-methyl ribonucleotide
  modified_base 41: mod_base = OTHER; note = 2'-O-methyl ribonucleotide
  modified_base 42: mod_base = OTHER; note = 2'-O-methyl ribonucleotide
  modified_base 46: mod_base = OTHER; note = 2'-O-methyl ribonucleotide
  modified_base 48: mod_base = OTHER; note = 2'-O-methyl ribonucleotide
  modified_base 50: mod_base = OTHER; note = 2'-O-methyl ribonucleotide
  modified_base 52: mod_base = OTHER; note = 2'-O-methyl ribonucleotide
  modified_base 53: mod_base = OTHER; note = 2'-O-methyl ribonucleotide
  modified_base 54: mod_base = OTHER; note = 2'-O-methyl ribonucleotide
  modified_base 57: mod_base = OTHER; note = 2'-O-methyl ribonucleotide
  modified_base 61: mod_base = OTHER; note = 2'-O-methyl ribonucleotide
  modified_base 66: mod_base = OTHER; note = 2'-O-methyl ribonucleotide
  modified_base 67: mod_base = OTHER; note = 2'-O-methyl ribonucleotide
  modified_base 70: mod_base = OTHER; note = 2'-O-methyl ribonucleotide
  modified_base 71: mod_base = OTHER; note = 2'-O-methyl ribonucleotide
  modified_base 72: mod_base = OTHER; note = 2'-O-methyl ribonucleotide
  modified_base 73: mod_base = OTHER; note = 2'-O-methyl ribonucleotide
  modified_base 74: mod_base = OTHER; note = 2'-O-methyl ribonucleotide
  modified_base 75: mod_base = OTHER; note = 2'-O-methyl ribonucleotide
  modified_base 76: mod_base = OTHER; note = 2'-O-methyl ribonucleotide
  modified_base 77: mod_base = OTHER; note = 2'-O-methyl ribonucleotide
  modified_base 78: mod_base = OTHER; note = 2'-O-methyl ribonucleotide
  modified_base 79: mod_base = OTHER; note = 2'-O-methyl ribonucleotide
  modified_base 80: mod_base = OTHER; note = 2'-O-methyl ribonucleotide
  modified_base 82: mod_base = OTHER; note = 2'-O-methyl ribonucleotide
  modified_base 83: mod_base = OTHER; note = 2'-O-methyl ribonucleotide
  modified_base 84: mod_base = OTHER; note = 2'-O-methyl ribonucleotide
  modified_base 85: mod_base = OTHER; note = 2'-O-methyl ribonucleotide
  modified_base 86: mod_base = OTHER; note = 2'-O-methyl ribonucleotide
  modified_base 87: mod_base = OTHER; note = 2'-O-methyl ribonucleotide
  modified_base 89: mod_base = OTHER; note = 2'-O-methyl ribonucleotide
  modified_base 92: mod_base = OTHER; note = 2'-O-methyl ribonucleotide
  modified_base 93: mod_base = OTHER; note = 2'-O-methyl ribonucleotide
  modified_base 94: mod_base = OTHER; note = 2'-O-methyl ribonucleotide
  modified_base 95: mod_base = OTHER; note = 2'-O-methyl ribonucleotide
  modified_base 96: mod_base = OTHER; note = 2'-O-methyl ribonucleotide
  modified_base 97: mod_base = OTHER; note = 2'-O-methyl ribonucleotide
  modified_base 98: mod_base = OTHER; note = 2'-O-methyl ribonucleotide
  modified_base 99: mod_base = OTHER; note = 2'-O-methyl ribonucleotide
  modified_base 100: mod_base = OTHER; note = 2'-O-methyl ribonucleotide
  modified_base 101: mod_base = OTHER; note = uniform ribonucleotides (A, C, G, inosine or U), deoxynucleotides (A, G, C, inosine or T), ribonebularine, 2'-O-methylnebularine or deoxynebularine
  modified_base 102: mod_base = OTHER; note = uniform ribonucleotides (A, C, G, inosine or U), deoxynucleotides (A, G, C, inosine or T), ribonebularine, 2'-O-methylnebularine or deoxynebularine
  modified_base 103: mod_base = OTHER; note = uniform ribonucleotides (A, C, G, inosine or U), deoxynucleotides (A, G, C, inosine or T), ribonebularine, 2'-O-methylnebularine or deoxynebularine
  modified_base 1..3: mod_base = OTHER; note = phosphorothioate linkage
  modified_base 45..46: mod_base = OTHER; note = phosphorothioate linkage
  modified_base 97..100: mod_base = OTHER; note = phosphorothioate linkage
  misc_feature 1..100: note = RNA
  misc_feature 101..103: note = Optionally DNA or RNA

SEQ ID NO: 2918 - DNA, 103 bp, synthetic construct; identical to SEQ ID NO: 1797
  source 1..103: mol_type = other DNA
  modified_base 1: mod_base = OTHER; note = 2'-O-methyl ribonucleotide
  modified_base 2: mod_base = OTHER; note = 2'-O-methyl ribonucleotide
  modified_base 3: mod_base = OTHER; note = 2'-O-methyl ribonucleotide
  modified_base 21: mod_base = OTHER; note = 2'-O-methyl ribonucleotide
  modified_base 28: mod_base = OTHER; note = 2'-O-methyl ribonucleotide
  modified_base 29: mod_base = OTHER; note = 2'-O-methyl ribonucleotide
  modified_base 30: mod_base = OTHER; note = 2'-O-methyl ribonucleotide
  modified_base 31: mod_base = OTHER; note = 2'-O-methyl ribonucleotide
  modified_base 32: mod_base = OTHER; note = 2'-O-methyl ribonucleotide
  modified_base 33: mod_base = OTHER; note = 2'-O-methyl ribonucleotide
  modified_base 34: mod_base = OTHER; note = 2'-O-methyl ribonucleotide
  modified_base 35: mod_base = OTHER; note = 2'-O-methyl ribonucleotide
  modified_base 36: mod_base = OTHER; note = 2'-O-methyl ribonucleotide
  modified_base 37: mod_base = OTHER; note = 2'-O-methyl ribonucleotide
  modified_base 38: mod_base = OTHER; note = 2'-O-methyl ribonucleotide
  modified_base 39: mod_base = OTHER; note = 2'-O-methyl ribonucleotide
  modified_base 40: mod_base = OTHER; note = 2'-O-methyl ribonucleotide
  modified_base 41: mod_base = OTHER; note = 2'-O-methyl ribonucleotide
  modified_base 42: mod_base = OTHER; note = 2'-O-methyl ribonucleotide
  modified_base 46: mod_base = OTHER; note = 2'-O-methyl ribonucleotide
  modified_base 48: mod_base = OTHER; note = 2'-O-methyl ribonucleotide
  modified_base 50: mod_base = OTHER; note = 2'-O-methyl ribonucleotide
  modified_base 52: mod_base = OTHER; note = 2'-O-methyl ribonucleotide
  modified_base 53: mod_base = OTHER; note = 2'-O-methyl ribonucleotide
  modified_base 54: mod_base = OTHER; note = 2'-O-methyl ribonucleotide
  modified_base 57: mod_base = OTHER; note = 2'-O-methyl ribonucleotide
  modified_base 61: mod_base = OTHER; note = 2'-O-methyl ribonucleotide
  modified_base 66: mod_base = OTHER; note = 2'-O-methyl ribonucleotide
  modified_base 67: mod_base = OTHER; note = 2'-O-methyl ribonucleotide
  modified_base 70: mod_base = OTHER; note = 2'-O-methyl ribonucleotide
  modified_base 71: mod_base = OTHER; note = 2'-O-methyl ribonucleotide
  modified_base 72: mod_base = OTHER; note = 2'-O-methyl ribonucleotide
  modified_base 73: mod_base = OTHER; note = 2'-O-methyl ribonucleotide
  modified_base 74: mod_base = OTHER; note = 2'-O-methyl ribonucleotide
  modified_base 75: mod_base = OTHER; note = 2'-O-methyl ribonucleotide
  modified_base 76: mod_base = OTHER; note = 2'-O-methyl ribonucleotide
  modified_base 77: mod_base = OTHER; note = 2'-O-methyl ribonucleotide
  modified_base 78: mod_base = OTHER; note = 2'-O-methyl ribonucleotide
  modified_base 79: mod_base = OTHER; note = 2'-O-methyl ribonucleotide
  modified_base 80: mod_base = OTHER; note = 2'-O-methyl ribonucleotide
  modified_base 82: mod_base = OTHER; note = 2'-O-methyl ribonucleotide
  modified_base 83: mod_base = OTHER; note = 2'-O-methyl ribonucleotide
  modified_base 84: mod_base = OTHER; note = 2'-O-methyl ribonucleotide
  modified_base 85: mod_base = OTHER; note = 2'-O-methyl ribonucleotide
  modified_base 86: mod_base = OTHER; note = 2'-O-methyl ribonucleotide
  modified_base 87: mod_base = OTHER; note = 2'-O-methyl ribonucleotide
  modified_base 89: mod_base = OTHER; note = 2'-O-methyl ribonucleotide
  modified_base 91: mod_base = OTHER; note = 2'-O-methyl ribonucleotide
  modified_base 92: mod_base = OTHER; note = 2'-O-methyl ribonucleotide
  modified_base 93: mod_base = OTHER; note = 2'-O-methyl ribonucleotide
  modified_base 94: mod_base = OTHER; note = 2'-O-methyl ribonucleotide
  modified_base 95: mod_base = OTHER; note = 2'-O-methyl ribonucleotide
  modified_base 96: mod_base = OTHER; note = 2'-O-methyl ribonucleotide
  modified_base 97: mod_base = OTHER; note = 2'-O-methyl ribonucleotide
  modified_base 98: mod_base = OTHER; note = 2'-O-methyl ribonucleotide
  modified_base 99: mod_base = OTHER; note = 2'-O-methyl ribonucleotide
  modified_base 100: mod_base = OTHER; note = 2'-O-methyl ribonucleotide
  modified_base 101: mod_base = OTHER; note = uniform ribonucleotides (A, C, G, inosine or U), deoxynucleotides (A, G, C, inosine or T), ribonebularine, 2'-O-methylnebularine or deoxynebularine
  modified_base 102: mod_base = OTHER; note = uniform ribonucleotides (A, C, G, inosine or U), deoxynucleotides (A, G, C, inosine or T), ribonebularine, 2'-O-methylnebularine or deoxynebularine
  modified_base 103: mod_base = OTHER; note = uniform ribonucleotides (A, C, G, inosine or U), deoxynucleotides (A, G, C, inosine or T), ribonebularine, 2'-O-methylnebularine or deoxynebularine
  modified_base 1..3: mod_base = OTHER; note = phosphorothioate linkage
  modified_base 45..46: mod_base = OTHER; note = phosphorothioate linkage
  modified_base 97..100: mod_base = OTHER; note = phosphorothioate linkage
  misc_feature 1..100: note = RNA
  misc_feature 101..103: note = Optionally DNA or RNA

SEQ ID NO: 2919 - DNA, 103 bp, synthetic construct; identical to SEQ ID NO: 1797
  source 1..103: mol_type = other DNA
  modified_base 1: mod_base = OTHER; note = 2'-O-methyl ribonucleotide
  modified_base 2: mod_base = OTHER; note = 2'-O-methyl ribonucleotide
  modified_base 3: mod_base = OTHER; note = 2'-O-methyl ribonucleotide
  modified_base 21: mod_base = OTHER; note = 2'-O-methyl ribonucleotide
  modified_base 28: mod_base = OTHER; note = 2'-O-methyl ribonucleotide
  modified_base 29: mod_base = OTHER; note = 2'-O-methyl ribonucleotide
  modified_base 30: mod_base = OTHER; note = 2'-O-methyl ribonucleotide
  modified_base 31: mod_base = OTHER; note = 2'-O-methyl ribonucleotide
  modified_base 32: mod_base = OTHER; note = 2'-O-methyl ribonucleotide
  modified_base 34: mod_base = OTHER; note = 2'-O-methyl ribonucleotide
  modified_base 35: mod_base = OTHER; note = 2'-O-methyl ribonucleotide
  modified_base 36: mod_base = OTHER; note = 2'-O-methyl ribonucleotide
  modified_base 37: mod_base = OTHER; note = 2'-O-methyl ribonucleotide
  modified_base 38: mod_base = OTHER; note = 2'-O-methyl ribonucleotide
  modified_base 39: mod_base = OTHER; note = 2'-O-methyl ribonucleotide
  modified_base 40: mod_base = OTHER; note = 2'-O-methyl ribonucleotide
  modified_base 41: mod_base = OTHER; note = 2'-O-methyl ribonucleotide
  modified_base 42: mod_base = OTHER; note = 2'-O-methyl ribonucleotide
  modified_base 46: mod_base = OTHER; note = 2'-O-methyl ribonucleotide
  modified_base 48: mod_base = OTHER; note = 2'-O-methyl ribonucleotide
  modified_base 50: mod_base = OTHER; note = 2'-O-methyl ribonucleotide
  modified_base 52: mod_base = OTHER; note = 2'-O-methyl ribonucleotide
  modified_base 53: mod_base = OTHER; note = 2'-O-methyl ribonucleotide
  modified_base 54: mod_base = OTHER; note = 2'-O-methyl ribonucleotide
  modified_base 57: mod_base = OTHER; note = 2'-O-methyl ribonucleotide
  modified_base 61: mod_base = OTHER; note = 2'-O-methyl ribonucleotide
  modified_base 66: mod_base = OTHER; note = 2'-O-methyl ribonucleotide
  modified_base 67: mod_base = OTHER; note = 2'-O-methyl ribonucleotide
  modified_base 70: mod_base = OTHER; note = 2'-O-methyl ribonucleotide
  modified_base 71: mod_base = OTHER; note = 2'-O-methyl ribonucleotide
  modified_base 72: mod_base = OTHER; note = 2'-O-methyl ribonucleotide
  modified_base 73: mod_base = OTHER; note = 2'-O-methyl ribonucleotide
  modified_base 74: mod_base = OTHER; note = 2'-O-methyl ribonucleotide
  modified_base 75: mod_base = OTHER; note = 2'-O-methyl ribonucleotide
  modified_base 76: mod_base = OTHER; note = 2'-O-methyl ribonucleotide
  modified_base 77: mod_base = OTHER; note = 2'-O-methyl ribonucleotide
  modified_base 78: mod_base = OTHER; note = 2'-O-methyl ribonucleotide
  modified_base 79: mod_base = OTHER; note = 2'-O-methyl ribonucleotide
  modified_base 80: mod_base = OTHER; note = 2'-O-methyl ribonucleotide
  modified_base 82: mod_base = OTHER; note = 2'-O-methyl ribonucleotide
  modified_base 83: mod_base = OTHER; note = 2'-O-methyl ribonucleotide
  modified_base 84: mod_base = OTHER; note = 2'-O-methyl ribonucleotide
  modified_base 85: mod_base = OTHER; note = 2'-O-methyl ribonucleotide
  modified_base 86: mod_base = OTHER; note = 2'-O-methyl ribonucleotide
  modified_base 87: mod_base = OTHER; note = 2'-O-methyl ribonucleotide
  modified_base 89: mod_base = OTHER; note = 2'-O-methyl ribonucleotide
  modified_base 92: mod_base = OTHER; note = 2'-O-methyl ribonucleotide
  modified_base 93: mod_base = OTHER; note = 2'-O-methyl ribonucleotide
  modified_base 94: mod_base = OTHER; note = 2'-O-methyl ribonucleotide
  modified_base 95: mod_base = OTHER; note = 2'-O-methyl ribonucleotide
  modified_base 96: mod_base = OTHER; note = 2'-O-methyl ribonucleotide
  modified_base 97: mod_base = OTHER; note = 2'-O-methyl ribonucleotide
  modified_base 98: mod_base = OTHER; note = 2'-O-methyl ribonucleotide
  modified_base 99: mod_base = OTHER; note = 2'-O-methyl ribonucleotide
  modified_base 100: mod_base = OTHER; note = 2'-O-methyl ribonucleotide
  modified_base 101: mod_base = OTHER; note = uniform ribonucleotides (A, C, G, inosine or U), deoxynucleotides (A, G, C, inosine or T), ribonebularine, 2'-O-methylnebularine or deoxynebularine
  modified_base 102: mod_base = OTHER; note = uniform ribonucleotides (A, C, G, inosine or U), deoxynucleotides (A, G, C, inosine or T), ribonebularine, 2'-O-methylnebularine or deoxynebularine
  modified_base 103: mod_base = OTHER; note = uniform ribonucleotides (A, C, G, inosine or U), deoxynucleotides (A, G, C, inosine or T), ribonebularine, 2'-O-methylnebularine or deoxynebularine
  modified_base 1..3: mod_base = OTHER; note = phosphorothioate linkage
  modified_base 45..46: mod_base = OTHER; note = phosphorothioate linkage
  modified_base 97..100: mod_base = OTHER; note = phosphorothioate linkage
  misc_feature 1..100: note = RNA
  misc_feature 101..103: note = Optionally DNA or RNA

SEQ ID NO: 2920 - DNA, 103 bp, synthetic construct; identical to SEQ ID NO: 1797
  source 1..103: mol_type = other DNA
  modified_base 1: mod_base = OTHER; note = 2'-O-methyl ribonucleotide
  modified_base 2: mod_base = OTHER; note = 2'-O-methyl ribonucleotide
  modified_base 3: mod_base = OTHER; note = 2'-O-methyl ribonucleotide
  modified_base 21: mod_base = OTHER; note = 2'-O-methyl ribonucleotide
  modified_base 28: mod_base = OTHER; note = 2'-O-methyl ribonucleotide
  modified_base 29: mod_base = OTHER; note = 2'-O-methyl ribonucleotide
  modified_base 30: mod_base = OTHER; note = 2'-O-methyl ribonucleotide
  modified_base 31: mod_base = OTHER; note = 2'-O-methyl ribonucleotide
  modified_base 32: mod_base = OTHER; note = 2'-O-methyl ribonucleotide
  modified_base 34: mod_base = OTHER; note = 2'-O-methyl ribonucleotide
  modified_base 35: mod_base = OTHER; note = 2'-O-methyl ribonucleotide
  modified_base 36: mod_base = OTHER; note = 2'-O-methyl ribonucleotide
  modified_base 37: mod_base = OTHER; note = 2'-O-methyl ribonucleotide
  modified_base 38: mod_base = OTHER; note = 2'-O-methyl ribonucleotide
  modified_base 39: mod_base = OTHER; note = 2'-O-methyl ribonucleotide
  modified_base 40: mod_base = OTHER; note = 2'-O-methyl ribonucleotide
  modified_base 41: mod_base = OTHER; note = 2'-O-methyl ribonucleotide
  modified_base 42: mod_base = OTHER; note = 2'-O-methyl ribonucleotide
  modified_base 46: mod_base = OTHER; note = 2'-O-methyl ribonucleotide
  modified_base 48: mod_base = OTHER; note = 2'-O-methyl ribonucleotide
  modified_base 50: mod_base = OTHER; note = 2'-O-methyl ribonucleotide
  modified_base 52: mod_base = OTHER; note = 2'-O-methyl ribonucleotide
  modified_base 53: mod_base = OTHER; note = 2'-O-methyl ribonucleotide
  modified_base 54: mod_base = OTHER; note = 2'-O-methyl ribonucleotide
  modified_base 57: mod_base = OTHER; note = 2'-O-methyl ribonucleotide
  modified_base 61: mod_base = OTHER; note = 2'-O-methyl ribonucleotide
  modified_base 66: mod_base = OTHER; note = 2'-O-methyl ribonucleotide
  modified_base 67: mod_base = OTHER; note = 2'-O-methyl ribonucleotide
  modified_base 70: mod_base = OTHER; note = 2'-O-methyl ribonucleotide
  modified_base 71: mod_base = OTHER; note = 2'-O-methyl ribonucleotide
  modified_base 72: mod_base = OTHER; note = 2'-O-methyl ribonucleotide
  modified_base 73: mod_base = OTHER; note = 2'-O-methyl ribonucleotide
  modified_base 74: mod_base = OTHER; note = 2'-O-methyl ribonucleotide
  modified_base 75: mod_base = OTHER; note = 2'-O-methyl ribonucleotide
  modified_base 76: mod_base = OTHER; note = 2'-O-methyl ribonucleotide
  modified_base 77: mod_base = OTHER; note = 2'-O-methyl ribonucleotide
  modified_base 78: mod_base = OTHER; note = 2'-O-methyl ribonucleotide
  modified_base 79: mod_base = OTHER; note = 2'-O-methyl ribonucleotide
  modified_base 80: mod_base = OTHER; note = 2'-O-methyl ribonucleotide
  modified_base 82: mod_base = OTHER; note = 2'-O-methyl ribonucleotide
  modified_base 83: mod_base = OTHER; note = 2'-O-methyl ribonucleotide
  modified_base 84: mod_base = OTHER; note = 2'-O-methyl ribonucleotide
  modified_base 85: mod_base = OTHER; note = 2'-O-methyl ribonucleotide
  modified_base 86: mod_base = OTHER; note = 2'-O-methyl ribonucleotide
  modified_base 87: mod_base = OTHER; note = 2'-O-methyl ribonucleotide
  modified_base 89: mod_base = OTHER; note = 2'-O-methyl ribonucleotide
  modified_base 91: mod_base = OTHER; note = 2'-O-methyl ribonucleotide
  modified_base 92: mod_base = OTHER; note = 2'-O-methyl ribonucleotide
  modified_base 93: mod_base = OTHER; note = 2'-O-methyl ribonucleotide
  modified_base 94: mod_base = OTHER; note = 2'-O-methyl ribonucleotide
  modified_base 95: mod_base = OTHER; note = 2'-O-methyl ribonucleotide
  modified_base 96: mod_base = OTHER; note = 2'-O-methyl ribonucleotide
  modified_base 97: mod_base = OTHER; note = 2'-O-methyl ribonucleotide
  modified_base 98: mod_base = OTHER; note = 2'-O-methyl ribonucleotide
  modified_base 99: mod_base = OTHER; note = 2'-O-methyl ribonucleotide
  modified_base 100: mod_base = OTHER; note = 2'-O-methyl ribonucleotide
  modified_base 101: mod_base = OTHER; note = uniform ribonucleotides (A, C, G, inosine or U), deoxynucleotides (A, G, C, inosine or T), ribonebularine, 2'-O-methylnebularine or deoxynebularine
  modified_base 102: mod_base = OTHER; note = uniform ribonucleotides (A, C, G, inosine or U), deoxynucleotides (A, G, C, inosine or T), ribonebularine, 2'-O-methylnebularine or deoxynebularine
  modified_base 103: mod_base = OTHER; note = uniform ribonucleotides (A, C, G, inosine or U), deoxynucleotides (A, G, C, inosine or T), ribonebularine, 2'-O-methylnebularine or deoxynebularine
  modified_base 1..3: mod_base = OTHER; note = phosphorothioate linkage
  modified_base 45..46: mod_base = OTHER; note = phosphorothioate linkage
  modified_base 97..100: mod_base = OTHER; note = phosphorothioate linkage
  misc_feature 1..100: note = RNA
  misc_feature 101..103: note = Optionally DNA or RNA

SEQ ID NO: 2921 - DNA, 103 bp, synthetic construct; identical to SEQ ID NO: 1797
  source 1..103: mol_type = other DNA
  modified_base 1: mod_base = OTHER; note = 2'-O-methyl ribonucleotide
  modified_base 2: mod_base = OTHER; note = 2'-O-methyl ribonucleotide
  modified_base 3: mod_base = OTHER; note = 2'-O-methyl ribonucleotide
  modified_base 21: mod_base = OTHER; note = 2'-O-methyl ribonucleotide
  modified_base 28: mod_base = OTHER; note = 2'-O-methyl ribonucleotide
  modified_base 29: mod_base = OTHER; note = 2'-O-methyl ribonucleotide
  modified_base 30: mod_base = OTHER; note = 2'-O-methyl ribonucleotide
  modified_base 31: mod_base = OTHER; note = 2'-O-methyl ribonucleotide
  modified_base 32: mod_base = OTHER; note = 2'-O-methyl ribonucleotide
  modified_base 34: mod_base = OTHER; note = 2'-O-methyl ribonucleotide
  modified_base 35: mod_base = OTHER; note = 2'-O-methyl ribonucleotide
  modified_base 36: mod_base = OTHER; note = 2'-O-methyl ribonucleotide
  modified_base 37: mod_base = OTHER; note = 2'-O-methyl ribonucleotide
  modified_base 38: mod_base = OTHER; note = 2'-O-methyl ribonucleotide
  modified_base 39: mod_base = OTHER; note = 2'-O-methyl ribonucleotide
  modified_base 40: mod_base = OTHER; note = 2'-O-methyl ribonucleotide
  modified_base 41: mod_base = OTHER; note = 2'-O-methyl ribonucleotide
  modified_base 42: mod_base = OTHER; note = 2'-O-methyl ribonucleotide
  modified_base 46: mod_base = OTHER; note = 2'-O-methyl ribonucleotide
  modified_base 48: mod_base = OTHER; note = 2'-O-methyl ribonucleotide
  modified_base 50: mod_base = OTHER; note = 2'-O-methyl ribonucleotide
  modified_base 52: mod_base = OTHER; note = 2'-O-methyl ribonucleotide
  modified_base 53: mod_base = OTHER; note = 2'-O-methyl ribonucleotide
  modified_base 54: mod_base = OTHER; note = 2'-O-methyl ribonucleotide
  modified_base 55: mod_base = OTHER; note = 2'-O-methyl ribonucleotide
  modified_base 56: mod_base = OTHER; note = 2'-O-methyl ribonucleotide
  modified_base 57: mod_base = OTHER; note = 2'-O-methyl ribonucleotide
  modified_base 60: mod_base = OTHER; note = 2'-O-methyl ribonucleotide
  modified_base 61: mod_base = OTHER; note = 2'-O-methyl ribonucleotide
  modified_base 66: mod_base = OTHER; note = 2'-O-methyl ribonucleotide
  modified_base 67: mod_base = OTHER; note = 2'-O-methyl ribonucleotide
  modified_base 70: mod_base = OTHER; note = 2'-O-methyl ribonucleotide
  modified_base 71: mod_base = OTHER; note = 2'-O-methyl ribonucleotide
  modified_base 72: mod_base = OTHER; note = 2'-O-methyl ribonucleotide
  modified_base 74: mod_base = OTHER; note = 2'-O-methyl ribonucleotide
  modified_base 75: mod_base = OTHER; note = 2'-O-methyl ribonucleotide
  modified_base 76: mod_base = OTHER; note = 2'-O-methyl ribonucleotide
  modified_base 77: mod_base = OTHER; note = 2'-O-methyl ribonucleotide
  modified_base 78: mod_base = OTHER; note = 2'-O-methyl ribonucleotide
  modified_base 79: mod_base = OTHER; note = 2'-O-methyl ribonucleotide
  modified_base 80: mod_base = OTHER; note = 2'-O-methyl ribonucleotide
  modified_base 82: mod_base = OTHER; note = 2'-O-methyl ribonucleotide
  modified_base 83: mod_base = OTHER; note = 2'-O-methyl ribonucleotide
  modified_base 84: mod_base = OTHER; note = 2'-O-methyl ribonucleotide
  modified_base 85: mod_base = OTHER; note = 2'-O-methyl ribonucleotide
  modified_base 86: mod_base = OTHER; note = 2'-O-methyl ribonucleotide
  modified_base 87: mod_base = OTHER; note = 2'-O-methyl ribonucleotide
  modified_base 89: mod_base = OTHER; note = 2'-O-methyl ribonucleotide
  modified_base 92: mod_base = OTHER; note = 2'-O-methyl ribonucleotide
  modified_base 93: mod_base = OTHER; note = 2'-O-methyl ribonucleotide
  modified_base 94: mod_base = OTHER; note = 2'-O-methyl ribonucleotide
  modified_base 95: mod_base = OTHER; note = 2'-O-methyl ribonucleotide
  modified_base 96: mod_base = OTHER; note = 2'-O-methyl ribonucleotide
  modified_base 97: mod_base = OTHER; note = 2'-O-methyl ribonucleotide
  modified_base 98: mod_base = OTHER; note = 2'-O-methyl ribonucleotide
  modified_base 99: mod_base = OTHER; note = 2'-O-methyl ribonucleotide
  modified_base 100: mod_base = OTHER; note = 2'-O-methyl ribonucleotide
  modified_base 101: mod_base = OTHER; note = uniform ribonucleotides (A, C, G, inosine or U), deoxynucleotides (A, G, C, inosine or T), ribonebularine, 2'-O-methylnebularine or deoxynebularine
  modified_base 102: mod_base = OTHER; note = uniform ribonucleotides (A, C, G, inosine or U), deoxynucleotides (A, G, C, inosine or T), ribonebularine, 2'-O-methylnebularine or deoxynebularine
  modified_base 103: mod_base = OTHER; note = uniform ribonucleotides (A, C, G, inosine or U), deoxynucleotides (A, G, C, inosine or T), ribonebularine, 2'-O-methylnebularine or deoxynebularine
  modified_base 1..3: mod_base = OTHER; note = phosphorothioate linkage
  modified_base 45..46: mod_base = OTHER; note = phosphorothioate linkage
  modified_base 97..100: mod_base = OTHER; note = phosphorothioate linkage
  misc_feature 1..100: note = RNA
  misc_feature 101..103: note = Optionally DNA or RNA

SEQ ID NO: 2922 - DNA, 103 bp, synthetic construct; identical to SEQ ID NO: 1795
  source 1..103: mol_type = other DNA
  modified_base 1: mod_base = OTHER; note = 2'-O-methyl ribonucleotide
  modified_base 2: mod_base = OTHER; note = 2'-O-methyl ribonucleotide
  modified_base 3: mod_base = OTHER; note = 2'-O-methyl ribonucleotide
  modified_base 21: mod_base = OTHER; note = 2'-O-methyl ribonucleotide
  modified_base 28: mod_base = OTHER; note = 2'-O-methyl ribonucleotide
  modified_base 29: mod_base = OTHER; note = 2'-O-methyl ribonucleotide
  modified_base 30: mod_base = OTHER; note = 2'-O-methyl ribonucleotide
  modified_base 31: mod_base = OTHER; note = 2'-O-methyl ribonucleotide
  modified_base 32: mod_base = OTHER; note = 2'-O-methyl ribonucleotide
  modified_base 33: mod_base = OTHER; note = 2'-O-methyl ribonucleotide
  modified_base 34: mod_base = OTHER; note = 2'-O-methyl ribonucleotide
  modified_base 35: mod_base = OTHER; note = 2'-O-methyl ribonucleotide
  modified_base 36: mod_base = OTHER; note = 2'-O-methyl ribonucleotide
  modified_base 37: mod_base = OTHER; note = 2'-O-methyl ribonucleotide
  modified_base 38: mod_base = OTHER; note = 2'-O-methyl ribonucleotide
  modified_base 39: mod_base = OTHER; note = 2'-O-methyl ribonucleotide
  modified_base 40: mod_base = OTHER; note = 2'-O-methyl ribonucleotide
  modified_base 41: mod_base = OTHER; note = 2'-O-methyl ribonucleotide
  modified_base 42: mod_base = OTHER; note = 2'-O-methyl ribonucleotide
  modified_base 46: mod_base = OTHER; note = 2'-O-methyl ribonucleotide
  modified_base 48: mod_base = OTHER; note = 2'-O-methyl ribonucleotide
  modified_base 50: mod_base = OTHER; note = 2'-O-methyl ribonucleotide
  modified_base 52: mod_base = OTHER; note = 2'-O-methyl ribonucleotide
  modified_base 53: mod_base = OTHER; note = 2'-O-methyl ribonucleotide
  modified_base 54: mod_base = OTHER; note = 2'-O-methyl ribonucleotide
  modified_base 55: mod_base = OTHER; note = 2'-O-methyl ribonucleotide
  modified_base 56: mod_base = OTHER; note = 2'-O-methyl ribonucleotide
  modified_base 57: mod_base = OTHER; note = 2'-O-methyl ribonucleotide
  modified_base 60: mod_base = OTHER; note = 2'-O-methyl ribonucleotide
  modified_base 61: mod_base = OTHER; note = 2'-O-methyl ribonucleotide
  modified_base 66: mod_base = OTHER; note = 2'-O-methyl ribonucleotide
  modified_base 67: mod_base = OTHER; note = 2'-O-methyl ribonucleotide
  modified_base 70: mod_base = OTHER; note = 2'-O-methyl ribonucleotide
  modified_base 71: mod_base = OTHER; note = 2'-O-methyl ribonucleotide
  modified_base 72: mod_base = OTHER; note = 2'-O-methyl ribonucleotide
  modified_base 73: mod_base = OTHER; note = 2'-O-methyl ribonucleotide
  modified_base 74: mod_base = OTHER; note = 2'-O-methyl ribonucleotide
  modified_base 75: mod_base = OTHER; note = 2'-O-methyl ribonucleotide
  modified_base 76: mod_base = OTHER; note = 2'-O-methyl ribonucleotide
  modified_base 77: mod_base = OTHER; note = 2'-O-methyl ribonucleotide
  modified_base 78: mod_base = OTHER; note = 2'-O-methyl ribonucleotide
  modified_base 79: mod_base = OTHER; note = 2'-O-methyl ribonucleotide
  modified_base 80: mod_base = OTHER; note = 2'-O-methyl ribonucleotide
  modified_base 81: mod_base = OTHER; note = 2'-O-methyl ribonucleotide
  modified_base 83: mod_base = OTHER; note = 2'-O-methyl ribonucleotide
  modified_base 84: mod_base = OTHER; note = 2'-O-methyl ribonucleotide
  modified_base 85: mod_base = OTHER; note = 2'-O-methyl ribonucleotide
  modified_base 86: mod_base = OTHER; note = 2'-O-methyl ribonucleotide
  modified_base 87: mod_base = OTHER; note = 2'-O-methyl ribonucleotide
  modified_base 88: mod_base = OTHER; note = 2'-O-methyl ribonucleotide
  modified_base 89: mod_base = OTHER; note = 2'-O-methyl ribonucleotide
  modified_base 90: mod_base = OTHER; note = 2'-O-methyl ribonucleotide
  modified_base 91: mod_base = OTHER; note = 2'-O-methyl ribonucleotide
  modified_base 92: mod_base = OTHER; note = 2'-O-methyl ribonucleotide
  modified_base 93: mod_base = OTHER; note = 2'-O-methyl ribonucleotide
  modified_base 94: mod_base = OTHER; note = 2'-O-methyl ribonucleotide
  modified_base 95: mod_base = OTHER; note = 2'-O-methyl ribonucleotide
  modified_base 96: mod_base = OTHER; note = 2'-O-methyl ribonucleotide
  modified_base 97: mod_base = OTHER; note = 2'-O-methyl ribonucleotide
  modified_base 98: mod_base = OTHER; note = 2'-O-methyl ribonucleotide
  modified_base 99: mod_base = OTHER; note = 2'-O-methyl ribonucleotide
  modified_base 100: mod_base = OTHER; note = 2'-O-methyl ribonucleotide
  modified_base 101: mod_base = OTHER; note = uniform ribonucleotides (A, C, G, inosine or U), deoxynucleotides (A, G, C, inosine or T), ribonebularine, 2'-O-methylnebularine or deoxynebularine
  modified_base 102: mod_base = OTHER; note = uniform ribonucleotides (A, C, G, inosine or U), deoxynucleotides (A, G, C, inosine or T), ribonebularine, 2'-O-methylnebularine or deoxynebularine
  modified_base 103: mod_base = OTHER; note = uniform ribonucleotides (A, C, G, inosine or U), deoxynucleotides (A, G, C, inosine or T), ribonebularine, 2'-O-methylnebularine or deoxynebularine
  modified_base 1..3: mod_base = OTHER; note = phosphorothioate linkage
  modified_base 25..26: mod_base = OTHER; note = phosphorothioate linkage
  modified_base 97..100: mod_base = OTHER; note = phosphorothioate linkage
  misc_feature 1..100: note = RNA
  misc_feature 101..103: note = Optionally DNA or RNA

SEQ ID NO: 2923 - DNA, 103 bp, synthetic construct; identical to SEQ ID NO: 1795
  source 1..103: mol_type = other DNA
  modified_base 1: mod_base = OTHER; note = 2'-O-methyl ribonucleotide
  modified_base 2: mod_base = OTHER; note = 2'-O-methyl ribonucleotide
  modified_base 3: mod_base = OTHER; note = 2'-O-methyl ribonucleotide
  modified_base 21: mod_base = OTHER; note = 2'-O-methyl ribonucleotide
  modified_base 28: mod_base = OTHER; note = 2'-O-methyl ribonucleotide
  modified_base 29: mod_base = OTHER; note = 2'-O-methyl ribonucleotide
  modified_base 30: mod_base = OTHER; note = 2'-O-methyl ribonucleotide
  modified_base 31: mod_base = OTHER; note = 2'-O-methyl ribonucleotide
  modified_base 32: mod_base = OTHER; note = 2'-O-methyl ribonucleotide
  modified_base 34: mod_base = OTHER; note = 2'-O-methyl ribonucleotide
  modified_base 35: mod_base = OTHER; note = 2'-O-methyl ribonucleotide
  modified_base 36: mod_base = OTHER; note = 2'-O-methyl ribonucleotide
  modified_base 37: mod_base = OTHER; note = 2'-O-methyl ribonucleotide
  modified_base 38: mod_base = OTHER; note = 2'-O-methyl ribonucleotide
  modified_base 39: mod_base = OTHER; note = 2'-O-methyl ribonucleotide
  modified_base 40: mod_base = OTHER; note = 2'-O-methyl ribonucleotide
  modified_base 41: mod_base = OTHER; note = 2'-O-methyl ribonucleotide
  modified_base 42: mod_base = OTHER; note = 2'-O-methyl ribonucleotide
  modified_base 46: mod_base = OTHER; note = 2'-O-methyl ribonucleotide
  modified_base 48: mod_base = OTHER; note = 2'-O-methyl ribonucleotide
  modified_base 50: mod_base = OTHER; note = 2'-O-methyl ribonucleotide
  modified_base 52: mod_base = OTHER; note = 2'-O-methyl ribonucleotide
  modified_base 53: mod_base = OTHER; note = 2'-O-methyl ribonucleotide
  modified_base 54: mod_base = OTHER; note = 2'-O-methyl ribonucleotide
  modified_base 55: mod_base = OTHER; note = 2'-O-methyl ribonucleotide
  modified_base 56: mod_base = OTHER; note = 2'-O-methyl ribonucleotide
  modified_base 57: mod_base = OTHER; note = 2'-O-methyl ribonucleotide
  modified_base 60: mod_base = OTHER; note = 2'-O-methyl ribonucleotide
  modified_base 61: mod_base = OTHER; note = 2'-O-methyl ribonucleotide
  modified_base 66: mod_base = OTHER; note = 2'-O-methyl ribonucleotide
  modified_base 67: mod_base = OTHER; note = 2'-O-methyl ribonucleotide
  modified_base 70: mod_base = OTHER; note = 2'-O-methyl ribonucleotide
  modified_base 71: mod_base = OTHER; note = 2'-O-methyl ribonucleotide
  modified_base 72: mod_base = OTHER; note = 2'-O-methyl ribonucleotide
  modified_base 74: mod_base = OTHER; note = 2'-O-methyl ribonucleotide
  modified_base 75: mod_base = OTHER; note = 2'-O-methyl ribonucleotide
  modified_base 76: mod_base = OTHER; note = 2'-O-methyl ribonucleotide
  modified_base 77: mod_base = OTHER; note = 2'-O-methyl ribonucleotide
  modified_base 78: mod_base = OTHER; note = 2'-O-methyl ribonucleotide
  modified_base 79: mod_base = OTHER; note = 2'-O-methyl ribonucleotide
  modified_base 80: mod_base = OTHER; note = 2'-O-methyl ribonucleotide
  modified_base 81: mod_base = OTHER; note = 2'-O-methyl ribonucleotide
  modified_base 83: mod_base = OTHER; note = 2'-O-methyl ribonucleotide
  modified_base 84: mod_base = OTHER; note = 2'-O-methyl ribonucleotide
  modified_base 85: mod_base = OTHER; note = 2'-O-methyl ribonucleotide
  modified_base 86: mod_base = OTHER; note = 2'-O-methyl ribonucleotide
  modified_base 87: mod_base = OTHER; note = 2'-O-methyl ribonucleotide
  modified_base 88: mod_base = OTHER; note = 2'-O-methyl ribonucleotide
  modified_base 89: mod_base = OTHER; note = 2'-O-methyl ribonucleotide
  modified_base 90: mod_base = OTHER; note = 2'-O-methyl ribonucleotide
  modified_base 91: mod_base = OTHER; note = 2'-O-methyl ribonucleotide
  modified_base 92: mod_base = OTHER; note = 2'-O-methyl ribonucleotide
  modified_base 93: mod_base = OTHER; note = 2'-O-methyl ribonucleotide
  modified_base 94: mod_base = OTHER; note = 2'-O-methyl ribonucleotide
  modified_base 95: mod_base = OTHER; note = 2'-O-methyl ribonucleotide
  modified_base 96: mod_base = OTHER; note = 2'-O-methyl ribonucleotide
  modified_base 97: mod_base = OTHER; note = 2'-O-methyl ribonucleotide
  modified_base 98: mod_base = OTHER; note = 2'-O-methyl ribonucleotide
  modified_base 99: mod_base = OTHER; note = 2'-O-methyl ribonucleotide
  modified_base 100: mod_base = OTHER; note = 2'-O-methyl ribonucleotide
  modified_base 101: mod_base = OTHER; note = uniform ribonucleotides (A, C, G, inosine or U), deoxynucleotides (A, G, C, inosine or T), ribonebularine, 2'-O-methylnebularine or deoxynebularine
  modified_base 102: mod_base = OTHER; note = uniform ribonucleotides (A, C, G, inosine or U), deoxynucleotides (A, G, C, inosine or T), ribonebularine, 2'-O-methylnebularine or deoxynebularine
  modified_base 103: mod_base = OTHER; note = uniform ribonucleotides (A, C, G, inosine or U), deoxynucleotides (A, G, C, inosine or T), ribonebularine, 2'-O-methylnebularine or deoxynebularine
  modified_base 1..3: mod_base = OTHER; note = phosphorothioate linkage
  modified_base 25..26: mod_base = OTHER; note = phosphorothioate linkage
  modified_base 97..100: mod_base = OTHER; note = phosphorothioate linkage
  misc_feature 1..100: note = RNA
  misc_feature 101..103: note = Optionally DNA or RNA

SEQ ID NO: 2924 - DNA, 103 bp, synthetic construct; identical to SEQ ID NO: 1796
  source 1..103: mol_type = other DNA
  modified_base 1: mod_base = OTHER; note = 2'-O-methyl ribonucleotide
  modified_base 2: mod_base = OTHER; note = 2'-O-methyl ribonucleotide
  modified_base 3: mod_base = OTHER; note = 2'-O-methyl ribonucleotide
  modified_base 21: mod_base = OTHER; note = 2'-O-methyl ribonucleotide
  modified_base 28: mod_base = OTHER; note = 2'-O-methyl ribonucleotide
  modified_base 29: mod_base = OTHER; note = 2'-O-methyl ribonucleotide
  modified_base 30: mod_base = OTHER; note = 2'-O-methyl ribonucleotide
  modified_base 31: mod_base = OTHER; note = 2'-O-methyl ribonucleotide
  modified_base 32: mod_base = OTHER; note = 2'-O-methyl ribonucleotide
  modified_base 33: mod_base = OTHER; note = 2'-O-methyl ribonucleotide
  modified_base 34: mod_base = OTHER; note = 2'-O-methyl ribonucleotide
  modified_base 35: mod_base = OTHER; note = 2'-O-methyl ribonucleotide
  modified_base 36: mod_base = OTHER; note = 2'-O-methyl ribonucleotide
  modified_base 37: mod_base = OTHER; note = 2'-O-methyl ribonucleotide
  modified_base 38: mod_base = OTHER; note = 2'-O-methyl ribonucleotide
  modified_base 39: mod_base = OTHER; note = 2'-O-methyl ribonucleotide
  modified_base 40: mod_base = OTHER; note = 2'-O-methyl ribonucleotide
  modified_base 41: mod_base = OTHER; note = 2'-O-methyl ribonucleotide
  modified_base 42: mod_base = OTHER; note = 2'-O-methyl ribonucleotide
  modified_base 46: mod_base = OTHER; note = 2'-O-methyl ribonucleotide
  modified_base 48: mod_base = OTHER; note = 2'-O-methyl ribonucleotide
  modified_base 50: mod_base = OTHER; note = 2'-O-methyl ribonucleotide
  modified_base 52: mod_base = OTHER; note = 2'-O-methyl ribonucleotide
  modified_base 53: mod_base = OTHER; note = 2'-O-methyl ribonucleotide
  modified_base 54: mod_base = OTHER; note = 2'-O-methyl ribonucleotide
  modified_base 55: mod_base = OTHER; note = 2'-O-methyl ribonucleotide
  modified_base 56: mod_base = OTHER; note = 2'-O-methyl ribonucleotide
  modified_base 57: mod_base = OTHER; note = 2'-O-methyl ribonucleotide
  modified_base 60: mod_base = OTHER; note = 2'-O-methyl ribonucleotide
  modified_base 61: mod_base = OTHER; note = 2'-O-methyl ribonucleotide
  modified_base 66: mod_base = OTHER; note = 2'-O-methyl ribonucleotide
  modified_base 67: mod_base = OTHER; note = 2'-O-methyl ribonucleotide
  modified_base 70: mod_base = OTHER; note = 2'-O-methyl ribonucleotide
  modified_base 71: mod_base = OTHER; note = 2'-O-methyl ribonucleotide
  modified_base 72: mod_base = OTHER; note = 2'-O-methyl ribonucleotide
  modified_base 73: mod_base = OTHER; note = 2'-O-methyl ribonucleotide
  modified_base 74: mod_base = OTHER; note = 2'-O-methyl ribonucleotide
  modified_base 75: mod_base = OTHER; note = 2'-O-methyl ribonucleotide
  modified_base 76: mod_base = OTHER; note = 2'-O-methyl ribonucleotide
  modified_base 77: mod_base = OTHER; note = 2'-O-methyl ribonucleotide
  modified_base 78: mod_base = OTHER; note = 2'-O-methyl ribonucleotide
  modified_base 79: mod_base = OTHER; note = 2'-O-methyl ribonucleotide
  modified_base 80: mod_base = OTHER; note = 2'-O-methyl ribonucleotide
  modified_base 81: mod_base = OTHER; note = 2'-O-methyl ribonucleotide
  modified_base 83: mod_base = OTHER; note = 2'-O-methyl ribonucleotide
  modified_base 84: mod_base = OTHER; note = 2'-O-methyl ribonucleotide
  modified_base 85: mod_base = OTHER; note = 2'-O-methyl ribonucleotide
  modified_base 86: mod_base = OTHER; note = 2'-O-methyl ribonucleotide
  modified_base 87: mod_base = OTHER; note = 2'-O-methyl ribonucleotide
  modified_base 88: mod_base = OTHER; note = 2'-O-methyl ribonucleotide
  modified_base 89: mod_base = OTHER; note = 2'-O-methyl ribonucleotide
  modified_base 90: mod_base = OTHER; note = 2'-O-methyl ribonucleotide
  modified_base 91: mod_base = OTHER; note = 2'-O-methyl ribonucleotide
  modified_base 92: mod_base = OTHER; note = 2'-O-methyl ribonucleotide
  modified_base 93: mod_base = OTHER; note = 2'-O-methyl ribonucleotide
  modified_base 94: mod_base = OTHER; note = 2'-O-methyl ribonucleotide
  modified_base 95: mod_base = OTHER; note = 2'-O-methyl ribonucleotide
  modified_base 96: mod_base = OTHER; note = 2'-O-methyl ribonucleotide
  modified_base 97: mod_base = OTHER; note = 2'-O-methyl ribonucleotide
  modified_base 98: mod_base = OTHER; note = 2'-O-methyl ribonucleotide
  modified_base 99: mod_base = OTHER; note = 2'-O-methyl ribonucleotide
  modified_base 100: mod_base = OTHER; note = 2'-O-methyl ribonucleotide
  modified_base 101: mod_base = OTHER; note = uniform ribonucleotides (A, C, G, inosine or U), deoxynucleotides (A, G, C, inosine or T), ribonebularine, 2'-O-methylnebularine or deoxynebularine
  modified_base 102: mod_base = OTHER; note = uniform ribonucleotides (A, C, G, inosine or U), deoxynucleotides (A, G, C, inosine or T), ribonebularine, 2'-O-methylnebularine or deoxynebularine
  modified_base 103: mod_base = OTHER; note = uniform ribonucleotides (A, C, G, inosine or U), deoxynucleotides (A, G, C, inosine or T), ribonebularine, 2'-O-methylnebularine or deoxynebularine
  modified_base 1..3: mod_base = OTHER; note = phosphorothioate linkage
  modified_base 25..26: mod_base = OTHER; note = phosphorothioate linkage
  modified_base 97..100: mod_base = OTHER; note = phosphorothioate linkage
  misc_feature 1..100: note = RNA
  misc_feature 101..103: note = Optionally DNA or RNA

SEQ ID NO: 2925 - DNA, 103 bp, synthetic construct; identical to SEQ ID NO: 1796
  source 1..103: mol_type = other DNA
  modified_base 1: mod_base = OTHER; note = 2'-O-methyl ribonucleotide
  modified_base 2: mod_base = OTHER; note = 2'-O-methyl ribonucleotide
  modified_base 3: mod_base = OTHER; note = 2'-O-methyl ribonucleotide
  modified_base 21: mod_base = OTHER; note = 2'-O-methyl ribonucleotide
  modified_base 28: mod_base = OTHER; note = 2'-O-methyl ribonucleotide
  modified_base 29: mod_base = OTHER; note = 2'-O-methyl ribonucleotide
  modified_base 30: mod_base = OTHER; note = 2'-O-methyl ribonucleotide
  modified_base 31: mod_base = OTHER; note = 2'-O-methyl ribonucleotide
  modified_base 32: mod_base = OTHER; note = 2'-O-methyl ribonucleotide
  modified_base 34: mod_base = OTHER; note = 2'-O-methyl ribonucleotide
  modified_base 35: mod_base = OTHER; note = 2'-O-methyl ribonucleotide
  modified_base 36: mod_base = OTHER; note = 2'-O-methyl ribonucleotide
  modified_base 37: mod_base = OTHER; note = 2'-O-methyl ribonucleotide
  modified_base 38: mod_base = OTHER; note = 2'-O-methyl ribonucleotide
  modified_base 39: mod_base = OTHER; note = 2'-O-methyl ribonucleotide
  modified_base 40: mod_base = OTHER; note = 2'-O-methyl ribonucleotide
  modified_base 41: mod_base = OTHER; note = 2'-O-methyl ribonucleotide
  modified_base 42: mod_base = OTHER; note = 2'-O-methyl ribonucleotide
  modified_base 46: mod_base = OTHER; note = 2'-O-methyl ribonucleotide
  modified_base 48: mod_base = OTHER; note = 2'-O-methyl ribonucleotide
  modified_base 50: mod_base = OTHER; note = 2'-O-methyl ribonucleotide
  modified_base 52: mod_base = OTHER; note = 2'-O-methyl ribonucleotide
  modified_base 53: mod_base = OTHER; note = 2'-O-methyl ribonucleotide
  modified_base 54: mod_base = OTHER; note = 2'-O-methyl ribonucleotide
  modified_base 55: mod_base = OTHER; note = 2'-O-methyl ribonucleotide
  modified_base 56: mod_base = OTHER; note = 2'-O-methyl ribonucleotide
  modified_base 57: mod_base = OTHER; note = 2'-O-methyl ribonucleotide
  modified_base 60: mod_base = OTHER; note = 2'-O-methyl ribonucleotide
  modified_base 61: mod_base = OTHER; note = 2'-O-methyl ribonucleotide
  modified_base 66: mod_base = OTHER; note = 2'-O-methyl ribonucleotide
  modified_base 67: mod_base = OTHER; note = 2'-O-methyl ribonucleotide
  modified_base 70: mod_base = OTHER; note = 2'-O-methyl ribonucleotide
  modified_base 71: mod_base = OTHER; note = 2'-O-methyl ribonucleotide
  modified_base 72: mod_base = OTHER; note = 2'-O-methyl ribonucleotide
  modified_base 74: mod_base = OTHER; note = 2'-O-methyl ribonucleotide
  modified_base 75: mod_base = OTHER; note = 2'-O-methyl ribonucleotide
  modified_base 76: mod_base = OTHER; note = 2'-O-methyl ribonucleotide
  modified_base 77: mod_base = OTHER; note = 2'-O-methyl ribonucleotide
  modified_base 78: mod_base = OTHER; note = 2'-O-methyl ribonucleotide
  modified_base 79: mod_base = OTHER; note = 2'-O-methyl ribonucleotide
  modified_base 80: mod_base = OTHER; note = 2'-O-methyl ribonucleotide
  modified_base 81: mod_base = OTHER; note = 2'-O-methyl ribonucleotide
  modified_base 83: mod_base = OTHER; note = 2'-O-methyl ribonucleotide
  modified_base 84: mod_base = OTHER; note = 2'-O-methyl ribonucleotide
  modified_base 85: mod_base = OTHER; note = 2'-O-methyl ribonucleotide
  modified_base 86: mod_base = OTHER; note = 2'-O-methyl ribonucleotide
  modified_base 87: mod_base = OTHER; note = 2'-O-methyl ribonucleotide
  modified_base 88: mod_base = OTHER; note = 2'-O-methyl ribonucleotide
  modified_base 89: mod_base = OTHER; note = 2'-O-methyl ribonucleotide
  modified_base 90: mod_base = OTHER; note = 2'-O-methyl ribonucleotide
  modified_base 91: mod_base = OTHER; note = 2'-O-methyl ribonucleotide
  modified_base 92: mod_base = OTHER; note = 2'-O-methyl ribonucleotide
  modified_base 93: mod_base = OTHER; note = 2'-O-methyl ribonucleotide
  modified_base 94: mod_base = OTHER; note = 2'-O-methyl ribonucleotide
  modified_base 95: mod_base = OTHER; note = 2'-O-methyl ribonucleotide
  modified_base 96: mod_base = OTHER; note = 2'-O-methyl ribonucleotide
  modified_base 97: mod_base = OTHER; note = 2'-O-methyl ribonucleotide
  modified_base 98: mod_base = OTHER; note = 2'-O-methyl ribonucleotide
  modified_base 99: mod_base = OTHER; note = 2'-O-methyl ribonucleotide
  modified_base 100: mod_base = OTHER; note = 2'-O-methyl ribonucleotide
  modified_base 101: mod_base = OTHER; note = uniform ribonucleotides (A, C, G, inosine or U), deoxynucleotides (A, G, C, inosine or T), ribonebularine, 2'-O-methylnebularine or deoxynebularine
  modified_base 102: mod_base = OTHER; note = uniform ribonucleotides (A, C, G, inosine or U), deoxynucleotides (A, G, C, inosine or T), ribonebularine, 2'-O-methylnebularine or deoxynebularine
  modified_base 103: mod_base = OTHER; note = uniform ribonucleotides (A, C, G, inosine or U), deoxynucleotides (A, G, C, inosine or T), ribonebularine, 2'-O-methylnebularine or deoxynebularine
  modified_base 1..3: mod_base = OTHER; note = phosphorothioate linkage
  modified_base 25..26: mod_base = OTHER; note = phosphorothioate linkage
  modified_base 97..100: mod_base = OTHER; note = phosphorothioate linkage
  misc_feature 1..100: note = RNA
  misc_feature 101..103: note = Optionally DNA or RNA

SEQ ID NO: 2926 - DNA, 103 bp, synthetic construct; identical to SEQ ID NO: 1797
  source 1..103: mol_type = other DNA
  modified_base 1: mod_base = OTHER; note = 2'-O-methyl ribonucleotide
  modified_base 2: mod_base = OTHER; note = 2'-O-methyl ribonucleotide
  modified_base 3: mod_base = OTHER; note = 2'-O-methyl ribonucleotide
  modified_base 21: mod_base = OTHER; note = 2'-O-methyl ribonucleotide
  modified_base 28: mod_base = OTHER; note = 2'-O-methyl ribonucleotide
  modified_base 29: mod_base = OTHER; note = 2'-O-methyl ribonucleotide
  modified_base 30: mod_base = OTHER; note = 2'-O-methyl ribonucleotide
  modified_base 31: mod_base = OTHER; note = 2'-O-methyl ribonucleotide
  modified_base 32: mod_base = OTHER; note = 2'-O-methyl ribonucleotide
  modified_base 33: mod_base = OTHER; note = 2'-O-methyl ribonucleotide
  modified_base 34: mod_base = OTHER; note = 2'-O-methyl ribonucleotide
  modified_base 35: mod_base = OTHER; note = 2'-O-methyl ribonucleotide
  modified_base 36: mod_base = OTHER; note = 2'-O-methyl ribonucleotide
  modified_base 37: mod_base = OTHER; note = 2'-O-methyl ribonucleotide
  modified_base 38: mod_base = OTHER; note = 2'-O-methyl ribonucleotide
  modified_base 39: mod_base = OTHER; note = 2'-O-methyl ribonucleotide
  modified_base 40: mod_base = OTHER; note = 2'-O-methyl ribonucleotide
  modified_base 41: mod_base = OTHER; note = 2'-O-methyl ribonucleotide
  modified_base 42: mod_base = OTHER; note = 2'-O-methyl ribonucleotide
  modified_base 46: mod_base = OTHER; note = 2'-O-methyl ribonucleotide
  modified_base 48: mod_base = OTHER; note = 2'-O-methyl ribonucleotide
  modified_base 50: mod_base = OTHER; note = 2'-O-methyl ribonucleotide
  modified_base 52: mod_base = OTHER; note = 2'-O-methyl ribonucleotide
  modified_base 53: mod_base = OTHER; note = 2'-O-methyl ribonucleotide
  modified_base 54: mod_base = OTHER; note = 2'-O-methyl ribonucleotide
  modified_base 57: mod_base = OTHER; note = 2'-O-methyl ribonucleotide
  modified_base 61: mod_base = OTHER; note = 2'-O-methyl ribonucleotide
  modified_base 66: mod_base = OTHER; note = 2'-O-methyl ribonucleotide
  modified_base 67: mod_base = OTHER; note = 2'-O-methyl ribonucleotide
  modified_base 70: mod_base = OTHER; note = 2'-O-methyl ribonucleotide
  modified_base 71: mod_base = OTHER; note = 2'-O-methyl ribonucleotide
  modified_base 72: mod_base = OTHER; note = 2'-O-methyl ribonucleotide
  modified_base 74: mod_base = OTHER; note = 2'-O-methyl ribonucleotide
  modified_base 75: mod_base = OTHER; note = 2'-O-methyl ribonucleotide
  modified_base 76: mod_base = OTHER; note = 2'-O-methyl ribonucleotide
  modified_base 77: mod_base = OTHER; note = 2'-O-methyl ribonucleotide
  modified_base 78: mod_base = OTHER; note = 2'-O-methyl ribonucleotide
  modified_base 79: mod_base = OTHER; note = 2'-O-methyl ribonucleotide
  modified_base 80: mod_base = OTHER; note = 2'-O-methyl ribonucleotide
  modified_base 82: mod_base = OTHER; note = 2'-O-methyl ribonucleotide
  modified_base 83: mod_base = OTHER; note = 2'-O-methyl ribonucleotide
  modified_base 84: mod_base = OTHER; note = 2'-O-methyl ribonucleotide
  modified_base 85: mod_base = OTHER; note = 2'-O-methyl ribonucleotide
  modified_base 86: mod_base = OTHER; note = 2'-O-methyl ribonucleotide
  modified_base 87: mod_base = OTHER; note = 2'-O-methyl ribonucleotide
  modified_base 89: mod_base = OTHER; note = 2'-O-methyl ribonucleotide
  modified_base 92: mod_base = OTHER; note = 2'-O-methyl ribonucleotide
  modified_base 93: mod_base = OTHER; note = 2'-O-methyl ribonucleotide
  modified_base 94: mod_base = OTHER; note = 2'-O-methyl ribonucleotide
  modified_base 95: mod_base = OTHER; note = 2'-O-methyl ribonucleotide
  modified_base 96: mod_base = OTHER; note = 2'-O-methyl ribonucleotide
  modified_base 97: mod_base = OTHER; note = 2'-O-methyl ribonucleotide
  modified_base 98: mod_base = OTHER; note = 2'-O-methyl ribonucleotide
  modified_base 99: mod_base = OTHER; note = 2'-O-methyl ribonucleotide
  modified_base 100: mod_base = OTHER; note = 2'-O-methyl ribonucleotide
  modified_base 101: mod_base = OTHER; note = uniform ribonucleotides (A, C, G, inosine or U), deoxynucleotides (A, G, C, inosine or T), ribonebularine, 2'-O-methylnebularine or deoxynebularine
  modified_base 102: mod_base = OTHER; note = uniform ribonucleotides (A, C, G, inosine or U), deoxynucleotides (A, G, C, inosine or T), ribonebularine, 2'-O-methylnebularine or deoxynebularine
  modified_base 103: mod_base = OTHER; note = uniform ribonucleotides (A, C, G, inosine or U), deoxynucleotides (A, G, C, inosine or T), ribonebularine, 2'-O-methylnebularine or deoxynebularine
  modified_base 1..3: mod_base = OTHER; note = phosphorothioate linkage
  modified_base 25..26: mod_base = OTHER; note = phosphorothioate linkage
  modified_base 97..100: mod_base = OTHER; note = phosphorothioate linkage
  misc_feature 1..100: note = RNA
  misc_feature 101..103: note = Optionally DNA or RNA

SEQ ID NO: 2927 - DNA, 103 bp, synthetic construct; identical to SEQ ID NO: 1797
  source 1..103: mol_type = other DNA
  modified_base 1: mod_base = OTHER; note = 2'-O-methyl ribonucleotide
  modified_base 2: mod_base = OTHER; note = 2'-O-methyl ribonucleotide
  modified_base 3: mod_base = OTHER; note = 2'-O-methyl ribonucleotide
  modified_base 21: mod_base = OTHER; note = 2'-O-methyl ribonucleotide
  modified_base 28: mod_base = OTHER; note = 2'-O-methyl ribonucleotide
  modified_base 29: mod_base = OTHER; note = 2'-O-methyl ribonucleotide
  modified_base 30: mod_base = OTHER; note = 2'-O-methyl ribonucleotide
  modified_base 31: mod_base = OTHER; note = 2'-O-methyl ribonucleotide
  modified_base 32: mod_base = OTHER; note = 2'-O-methyl ribonucleotide
  modified_base 33: mod_base = OTHER; note = 2'-O-methyl ribonucleotide
  modified_base 34: mod_base = OTHER; note = 2'-O-methyl ribonucleotide
  modified_base 35: mod_base = OTHER; note = 2'-O-methyl ribonucleotide
  modified_base 36: mod_base = OTHER; note = 2'-O-methyl ribonucleotide
  modified_base 37: mod_base = OTHER; note = 2'-O-methyl ribonucleotide
  modified_base 38: mod_base = OTHER; note = 2'-O-methyl ribonucleotide
  modified_base 39: mod_base = OTHER; note = 2'-O-methyl ribonucleotide
  modified_base 40: mod_base = OTHER; note = 2'-O-methyl ribonucleotide
  modified_base 41: mod_base = OTHER; note = 2'-O-methyl ribonucleotide
  modified_base 42: mod_base = OTHER; note = 2'-O-methyl ribonucleotide
  modified_base 46: mod_base = OTHER; note = 2'-O-methyl ribonucleotide
  modified_base 48: mod_base = OTHER; note = 2'-O-methyl ribonucleotide
  modified_base 50: mod_base = OTHER; note = 2'-O-methyl ribonucleotide
  modified_base 52: mod_base = OTHER; note = 2'-O-methyl ribonucleotide
  modified_base 53: mod_base = OTHER; note = 2'-O-methyl ribonucleotide
  modified_base 54: mod_base = OTHER; note = 2'-O-methyl ribonucleotide
  modified_base 55: mod_base = OTHER; note = 2'-O-methyl ribonucleotide
  modified_base 56: mod_base = OTHER; note = 2'-O-methyl ribonucleotide
  modified_base 57: mod_base = OTHER; note = 2'-O-methyl ribonucleotide
  modified_base 60: mod_base = OTHER; note = 2'-O-methyl ribonucleotide
  modified_base 61: mod_base = OTHER; note = 2'-O-methyl ribonucleotide
  modified_base 66: mod_base = OTHER; note = 2'-O-methyl ribonucleotide
  modified_base 67: mod_base = OTHER; note = 2'-O-methyl ribonucleotide
  modified_base 70: mod_base = OTHER; note = 2'-O-methyl ribonucleotide
  modified_base 71: mod_base = OTHER; note = 2'-O-methyl ribonucleotide
  modified_base 72: mod_base = OTHER; note = 2'-O-methyl ribonucleotide
  modified_base 74: mod_base = OTHER; note = 2'-O-methyl ribonucleotide
  modified_base 75: mod_base = OTHER; note = 2'-O-methyl ribonucleotide
  modified_base 76: mod_base = OTHER; note = 2'-O-methyl ribonucleotide
  modified_base 77: mod_base = OTHER; note = 2'-O-methyl ribonucleotide
  modified_base 78: mod_base = OTHER; note = 2'-O-methyl ribonucleotide
  modified_base 79: mod_base = OTHER; note = 2'-O-methyl ribonucleotide
  modified_base 80: mod_base = OTHER; note = 2'-O-methyl ribonucleotide
  modified_base 82: mod_base = OTHER; note = 2'-O-methyl ribonucleotide
  modified_base 83: mod_base = OTHER; note = 2'-O-methyl ribonucleotide
  modified_base 84: mod_base = OTHER; note = 2'-O-methyl ribonucleotide
  modified_base 85: mod_base = OTHER; note = 2'-O-methyl ribonucleotide
  modified_base 86: mod_base = OTHER; note = 2'-O-methyl ribonucleotide
  modified_base 87: mod_base = OTHER; note = 2'-O-methyl ribonucleotide
  modified_base 89: mod_base = OTHER; note = 2'-O-methyl ribonucleotide
  modified_base 92: mod_base = OTHER; note = 2'-O-methyl ribonucleotide
  modified_base 93: mod_base = OTHER; note = 2'-O-methyl ribonucleotide
  modified_base 94: mod_base = OTHER; note = 2'-O-methyl ribonucleotide
  modified_base 95: mod_base = OTHER; note = 2'-O-methyl ribonucleotide
  modified_base 96: mod_base = OTHER; note = 2'-O-methyl ribonucleotide
  modified_base 97: mod_base = OTHER; note = 2'-O-methyl ribonucleotide
  modified_base 98: mod_base = OTHER; note = 2'-O-methyl ribonucleotide
  modified_base 99: mod_base = OTHER; note = 2'-O-methyl ribonucleotide
  modified_base 100: mod_base = OTHER; note = 2'-O-methyl ribonucleotide
  modified_base 101: mod_base = OTHER; note = uniform ribonucleotides (A, C, G, inosine or U), deoxynucleotides (A, G, C, inosine or T), ribonebularine, 2'-O-methylnebularine or deoxynebularine
  modified_base 102: mod_base = OTHER; note = uniform ribonucleotides (A, C, G, inosine or U), deoxynucleotides (A, G, C, inosine or T), ribonebularine, 2'-O-methylnebularine or deoxynebularine
  modified_base 103: mod_base = OTHER; note = uniform ribonucleotides (A, C, G, inosine or U), deoxynucleotides (A, G, C, inosine or T), ribonebularine, 2'-O-methylnebularine or deoxynebularine
  modified_base 1..3: mod_base = OTHER; note = phosphorothioate linkage
  modified_base 25..26: mod_base = OTHER; note = phosphorothioate linkage
  modified_base 97..100: mod_base = OTHER; note = phosphorothioate linkage
  misc_feature 1..100: note = RNA
  misc_feature 101..103: note = Optionally DNA or RNA

SEQ ID NO: 2928 - DNA, 103 bp, synthetic construct; identical to SEQ ID NO: 1797
  source 1..103: mol_type = other DNA
  modified_base 1: mod_base = OTHER; note = 2'-O-methyl ribonucleotide
  modified_base 2: mod_base = OTHER; note = 2'-O-methyl ribonucleotide
  modified_base 3: mod_base = OTHER; note = 2'-O-methyl ribonucleotide
  modified_base 21: mod_base = OTHER; note = 2'-O-methyl ribonucleotide
  modified_base 28: mod_base = OTHER; note = 2'-O-methyl ribonucleotide
  modified_base 29: mod_base = OTHER; note = 2'-O-methyl ribonucleotide
  modified_base 30: mod_base = OTHER; note = 2'-O-methyl ribonucleotide
  modified_base 31: mod_base = OTHER; note = 2'-O-methyl ribonucleotide
  modified_base 32: mod_base = OTHER; note = 2'-O-methyl ribonucleotide
  modified_base 33: mod_base = OTHER; note = 2'-O-methyl ribonucleotide
  modified_base 34: mod_base = OTHER; note = 2'-O-methyl ribonucleotide
  modified_base 35: mod_base = OTHER; note = 2'-O-methyl ribonucleotide
  modified_base 36: mod_base = OTHER; note = 2'-O-methyl ribonucleotide
  modified_base 37: mod_base = OTHER; note = 2'-O-methyl ribonucleotide
  modified_base 38: mod_base = OTHER; note = 2'-O-methyl ribonucleotide
  modified_base 39: mod_base = OTHER; note = 2'-O-methyl ribonucleotide
  modified_base 40: mod_base = OTHER; note = 2'-O-methyl ribonucleotide
  modified_base 41: mod_base = OTHER; note = 2'-O-methyl ribonucleotide
  modified_base 42: mod_base = OTHER; note = 2'-O-methyl ribonucleotide
  modified_base 46: mod_base = OTHER; note = 2'-O-methyl ribonucleotide
  modified_base 48: mod_base = OTHER; note = 2'-O-methyl ribonucleotide
  modified_base 50: mod_base = OTHER; note = 2'-O-methyl ribonucleotide
  modified_base 52: mod_base = OTHER; note = 2'-O-methyl ribonucleotide
  modified_base 53: mod_base = OTHER; note = 2'-O-methyl ribonucleotide
  modified_base 54: mod_base = OTHER; note = 2'-O-methyl ribonucleotide
  modified_base 57: mod_base = OTHER; note = 2'-O-methyl ribonucleotide
  modified_base 61: mod_base = OTHER; note = 2'-O-methyl ribonucleotide
  modified_base 66: mod_base = OTHER; note = 2'-O-methyl ribonucleotide
  modified_base 67: mod_base = OTHER; note = 2'-O-methyl ribonucleotide
  modified_base 70: mod_base = OTHER; note = 2'-O-methyl ribonucleotide
  modified_base 71: mod_base = OTHER; note = 2'-O-methyl ribonucleotide
  modified_base 72: mod_base = OTHER; note = 2'-O-methyl ribonucleotide
  modified_base 73: mod_base = OTHER; note = 2'-O-methyl ribonucleotide
  modified_base 74: mod_base = OTHER; note = 2'-O-methyl ribonucleotide
  modified_base 75: mod_base = OTHER; note = 2'-O-methyl ribonucleotide
  modified_base 76: mod_base = OTHER; note = 2'-O-methyl ribonucleotide
  modified_base 77: mod_base = OTHER; note = 2'-O-methyl ribonucleotide
  modified_base 78: mod_base = OTHER; note = 2'-O-methyl ribonucleotide
  modified_base 79: mod_base = OTHER; note = 2'-O-methyl ribonucleotide
  modified_base 80: mod_base = OTHER; note = 2'-O-methyl ribonucleotide
  modified_base 82: mod_base = OTHER; note = 2'-O-methyl ribonucleotide
  modified_base 83: mod_base = OTHER; note = 2'-O-methyl ribonucleotide
  modified_base 84: mod_base = OTHER; note = 2'-O-methyl ribonucleotide
  modified_base 85: mod_base = OTHER; note = 2'-O-methyl ribonucleotide
  modified_base 86: mod_base = OTHER; note = 2'-O-methyl ribonucleotide
  modified_base 87: mod_base = OTHER; note = 2'-O-methyl ribonucleotide
  modified_base 89: mod_base = OTHER; note = 2'-O-methyl ribonucleotide
  modified_base 92: mod_base = OTHER; note = 2'-O-methyl ribonucleotide
  modified_base 93: mod_base = OTHER; note = 2'-O-methyl ribonucleotide
  modified_base 94: mod_base = OTHER; note = 2'-O-methyl ribonucleotide
  modified_base 95: mod_base = OTHER; note = 2'-O-methyl ribonucleotide
  modified_base 96: mod_base = OTHER; note = 2'-O-methyl ribonucleotide
  modified_base 97: mod_base = OTHER; note = 2'-O-methyl ribonucleotide
  modified_base 98: mod_base = OTHER; note = 2'-O-methyl ribonucleotide
  modified_base 99: mod_base = OTHER; note = 2'-O-methyl ribonucleotide
  modified_base 100: mod_base = OTHER; note = 2'-O-methyl ribonucleotide
  modified_base 101: mod_base = OTHER; note = uniform ribonucleotides (A, C, G, inosine or U), deoxynucleotides (A, G, C, inosine or T), ribonebularine, 2'-O-methylnebularine or deoxynebularine
  modified_base 102: mod_base = OTHER; note = uniform ribonucleotides (A, C, G, inosine or U), deoxynucleotides (A, G, C, inosine or T), ribonebularine, 2'-O-methylnebularine or deoxynebularine
  modified_base 103: mod_base = OTHER; note = uniform ribonucleotides (A, C, G, inosine or U), deoxynucleotides (A, G, C, inosine or T), ribonebularine, 2'-O-methylnebularine or deoxynebularine
  modified_base 1..3: mod_base = OTHER; note = phosphorothioate linkage
  modified_base 25..26: mod_base = OTHER; note = phosphorothioate linkage
  modified_base 97..100: mod_base = OTHER; note = phosphorothioate linkage
  misc_feature 1..100: note = RNA
  misc_feature 101..103: note = Optionally DNA or RNA

SEQ ID NO: 2929 - DNA, 103 bp, synthetic construct; identical to SEQ ID NO: 1797
  source 1..103: mol_type = other DNA
  modified_base 1: mod_base = OTHER; note = 2'-O-methyl ribonucleotide
  modified_base 2: mod_base = OTHER; note = 2'-O-methyl ribonucleotide
  modified_base 3: mod_base = OTHER; note = 2'-O-methyl ribonucleotide
  modified_base 21: mod_base = OTHER; note = 2'-O-methyl ribonucleotide
  modified_base 28: mod_base = OTHER; note = 2'-O-methyl ribonucleotide
  modified_base 29: mod_base = OTHER; note = 2'-O-methyl ribonucleotide
  modified_base 30: mod_base = OTHER; note = 2'-O-methyl ribonucleotide
  modified_base 31: mod_base = OTHER; note = 2'-O-methyl ribonucleotide
  modified_base 32: mod_base = OTHER; note = 2'-O-methyl ribonucleotide
  modified_base 33: mod_base = OTHER; note = 2'-O-methyl ribonucleotide
  modified_base 34: mod_base = OTHER; note = 2'-O-methyl ribonucleotide
  modified_base 35: mod_base = OTHER; note = 2'-O-methyl ribonucleotide
  modified_base 36: mod_base = OTHER; note = 2'-O-methyl ribonucleotide
  modified_base 37: mod_base = OTHER; note = 2'-O-methyl ribonucleotide
  modified_base 38: mod_base = OTHER; note = 2'-O-methyl ribonucleotide
  modified_base 39: mod_base = OTHER; note = 2'-O-methyl ribonucleotide
  modified_base 40: mod_base = OTHER; note = 2'-O-methyl ribonucleotide
  modified_base 41: mod_base = OTHER; note = 2'-O-methyl ribonucleotide
  modified_base 42: mod_base = OTHER; note = 2'-O-methyl ribonucleotide
  modified_base 46: mod_base = OTHER; note = 2'-O-methyl ribonucleotide
  modified_base 48: mod_base = OTHER; note = 2'-O-methyl ribonucleotide
  modified_base 50: mod_base = OTHER; note = 2'-O-methyl ribonucleotide
  modified_base 52: mod_base = OTHER; note = 2'-O-methyl ribonucleotide
  modified_base 53: mod_base = OTHER; note = 2'-O-methyl ribonucleotide
  modified_base 54: mod_base = OTHER; note = 2'-O-methyl ribonucleotide
  modified_base 57: mod_base = OTHER; note = 2'-O-methyl ribonucleotide
  modified_base 61: mod_base = OTHER; note = 2'-O-methyl ribonucleotide
  modified_base 66: mod_base = OTHER; note = 2'-O-methyl ribonucleotide
  modified_base 67: mod_base = OTHER; note = 2'-O-methyl ribonucleotide
  modified_base 70: mod_base = OTHER; note = 2'-O-methyl ribonucleotide
  modified_base 71: mod_base = OTHER; note = 2'-O-methyl ribonucleotide
  modified_base 72: mod_base = OTHER; note = 2'-O-methyl ribonucleotide
  modified_base 73: mod_base = OTHER; note = 2'-O-methyl ribonucleotide
  modified_base 74: mod_base = OTHER; note = 2'-O-methyl ribonucleotide
  modified_base 75: mod_base = OTHER; note = 2'-O-methyl ribonucleotide
  modified_base 76: mod_base = OTHER; note = 2'-O-methyl ribonucleotide
  modified_base 77: mod_base = OTHER; note = 2'-O-methyl ribonucleotide
  modified_base 78: mod_base = OTHER; note = 2'-O-methyl ribonucleotide
  modified_base 79: mod_base = OTHER; note = 2'-O-methyl ribonucleotide
  modified_base 80: mod_base = OTHER; note = 2'-O-methyl ribonucleotide
  modified_base 82: mod_base = OTHER; note = 2'-O-methyl ribonucleotide
  modified_base 83: mod_base = OTHER; note = 2'-O-methyl ribonucleotide
  modified_base 84: mod_base = OTHER; note = 2'-O-methyl ribonucleotide
  modified_base 85: mod_base = OTHER; note = 2'-O-methyl ribonucleotide
  modified_base 86: mod_base = OTHER; note = 2'-O-methyl ribonucleotide
  modified_base 87: mod_base = OTHER; note = 2'-O-methyl ribonucleotide
  modified_base 89: mod_base = OTHER; note = 2'-O-methyl ribonucleotide
  modified_base 91: mod_base = OTHER; note = 2'-O-methyl ribonucleotide
  modified_base 92: mod_base = OTHER; note = 2'-O-methyl ribonucleotide
  modified_base 93: mod_base = OTHER; note = 2'-O-methyl ribonucleotide
  modified_base 94: mod_base = OTHER; note = 2'-O-methyl ribonucleotide
  modified_base 95: mod_base = OTHER; note = 2'-O-methyl ribonucleotide
  modified_base 96: mod_base = OTHER; note = 2'-O-methyl ribonucleotide
  modified_base 97: mod_base = OTHER; note = 2'-O-methyl ribonucleotide
  modified_base 98: mod_base = OTHER; note = 2'-O-methyl ribonucleotide
  modified_base 99: mod_base = OTHER; note = 2'-O-methyl ribonucleotide
  modified_base 100: mod_base = OTHER; note = 2'-O-methyl ribonucleotide
  modified_base 101: mod_base = OTHER; note = uniform ribonucleotides (A, C, G, inosine or U), deoxynucleotides (A, G, C, inosine or T), ribonebularine, 2'-O-methylnebularine or deoxynebularine
  modified_base 102: mod_base = OTHER; note = uniform ribonucleotides (A, C, G, inosine or U), deoxynucleotides (A, G, C, inosine or T), ribonebularine, 2'-O-methylnebularine or deoxynebularine
  modified_base 103: mod_base = OTHER; note = uniform ribonucleotides (A, C, G, inosine or U), deoxynucleotides (A, G, C, inosine or T), ribonebularine, 2'-O-methylnebularine or deoxynebularine
  modified_base 1..3: mod_base = OTHER; note = phosphorothioate linkage
  modified_base 25..26: mod_base = OTHER; note = phosphorothioate linkage
  modified_base 97..100: mod_base = OTHER; note = phosphorothioate linkage
  misc_feature 1..100: note = RNA
  misc_feature 101..103: note = Optionally DNA or RNA

SEQ ID NO: 2930 - DNA, 103 bp, synthetic construct; identical to SEQ ID NO: 1797
  source 1..103: mol_type = other DNA
  modified_base 1: mod_base = OTHER; note = 2'-O-methyl ribonucleotide
  modified_base 2: mod_base = OTHER; note = 2'-O-methyl ribonucleotide
  modified_base 3: mod_base = OTHER; note = 2'-O-methyl ribonucleotide
  modified_base 21: mod_base = OTHER; note = 2'-O-methyl ribonucleotide
  modified_base 28: mod_base = OTHER; note = 2'-O-methyl ribonucleotide
  modified_base 29: mod_base = OTHER; note = 2'-O-methyl ribonucleotide
  modified_base 30: mod_base = OTHER; note = 2'-O-methyl ribonucleotide
  modified_base 31: mod_base = OTHER; note = 2'-O-methyl ribonucleotide
  modified_base 32: mod_base = OTHER; note = 2'-O-methyl ribonucleotide
  modified_base 34: mod_base = OTHER; note = 2'-O-methyl ribonucleotide
  modified_base 35: mod_base = OTHER; note = 2'-O-methyl ribonucleotide
  modified_base 36: mod_base = OTHER; note = 2'-O-methyl ribonucleotide
  modified_base 37: mod_base = OTHER; note = 2'-O-methyl ribonucleotide
  modified_base 38: mod_base = OTHER; note = 2'-O-methyl ribonucleotide
  modified_base 39: mod_base = OTHER; note = 2'-O-methyl ribonucleotide
  modified_base 40: mod_base = OTHER; note = 2'-O-methyl ribonucleotide
  modified_base 41: mod_base = OTHER; note = 2'-O-methyl ribonucleotide
  modified_base 42: mod_base = OTHER; note = 2'-O-methyl ribonucleotide
  modified_base 46: mod_base = OTHER; note = 2'-O-methyl ribonucleotide
  modified_base 48: mod_base = OTHER; note = 2'-O-methyl ribonucleotide
  modified_base 50: mod_base = OTHER; note = 2'-O-methyl ribonucleotide
  modified_base 52: mod_base = OTHER; note = 2'-O-methyl ribonucleotide
  modified_base 53: mod_base = OTHER; note = 2'-O-methyl ribonucleotide
  modified_base 54: mod_base = OTHER; note = 2'-O-methyl ribonucleotide
  modified_base 57: mod_base = OTHER; note = 2'-O-methyl ribonucleotide
  modified_base 61: mod_base = OTHER; note = 2'-O-methyl ribonucleotide
  modified_base 66: mod_base = OTHER; note = 2'-O-methyl ribonucleotide
  modified_base 67: mod_base = OTHER; note = 2'-O-methyl ribonucleotide
  modified_base 70: mod_base = OTHER; note = 2'-O-methyl ribonucleotide
  modified_base 71: mod_base = OTHER; note = 2'-O-methyl ribonucleotide
  modified_base 72: mod_base = OTHER; note = 2'-O-methyl ribonucleotide
  modified_base 73: mod_base = OTHER; note = 2'-O-methyl ribonucleotide
  modified_base 74: mod_base = OTHER; note = 2'-O-methyl ribonucleotide
  modified_base 75: mod_base = OTHER; note = 2'-O-methyl ribonucleotide
  modified_base 76: mod_base = OTHER; note = 2'-O-methyl ribonucleotide
  modified_base 77: mod_base = OTHER; note = 2'-O-methyl ribonucleotide
  modified_base 78: mod_base = OTHER; note = 2'-O-methyl ribonucleotide
  modified_base 79: mod_base = OTHER; note = 2'-O-methyl ribonucleotide
  modified_base 80: mod_base = OTHER; note = 2'-O-methyl ribonucleotide
  modified_base 82: mod_base = OTHER; note = 2'-O-methyl ribonucleotide
  modified_base 83: mod_base = OTHER; note = 2'-O-methyl ribonucleotide
  modified_base 84: mod_base = OTHER; note = 2'-O-methyl ribonucleotide
  modified_base 85: mod_base = OTHER; note = 2'-O-methyl ribonucleotide
  modified_base 86: mod_base = OTHER; note = 2'-O-methyl ribonucleotide
  modified_base 87: mod_base = OTHER; note = 2'-O-methyl ribonucleotide
  modified_base 89: mod_base = OTHER; note = 2'-O-methyl ribonucleotide
  modified_base 92: mod_base = OTHER; note = 2'-O-methyl ribonucleotide
  modified_base 93: mod_base = OTHER; note = 2'-O-methyl ribonucleotide
  modified_base 94: mod_base = OTHER; note = 2'-O-methyl ribonucleotide
  modified_base 95: mod_base = OTHER; note = 2'-O-methyl ribonucleotide
  modified_base 96: mod_base = OTHER; note = 2'-O-methyl ribonucleotide
  modified_base 97: mod_base = OTHER; note = 2'-O-methyl ribonucleotide
  modified_base 98: mod_base = OTHER; note = 2'-O-methyl ribonucleotide
  modified_base 99: mod_base = OTHER; note = 2'-O-methyl ribonucleotide
  modified_base 100: mod_base = OTHER; note = 2'-O-methyl ribonucleotide
  modified_base 101: mod_base = OTHER; note = uniform ribonucleotides (A, C, G, inosine or U), deoxynucleotides (A, G, C, inosine or T), ribonebularine, 2'-O-methylnebularine or deoxynebularine
  modified_base 102: mod_base = OTHER; note = uniform ribonucleotides (A, C, G, inosine or U), deoxynucleotides (A, G, C, inosine or T), ribonebularine, 2'-O-methylnebularine or deoxynebularine
  modified_base 103: mod_base = OTHER; note = uniform ribonucleotides (A, C, G, inosine or U), deoxynucleotides (A, G, C, inosine or T), ribonebularine, 2'-O-methylnebularine or deoxynebularine
  modified_base 1..3: mod_base = OTHER; note = phosphorothioate linkage
  modified_base 25..26: mod_base = OTHER; note = phosphorothioate linkage
  modified_base 97..100: mod_base = OTHER; note = phosphorothioate linkage
  misc_feature 1..100: note = RNA
  misc_feature 101..103: note = Optionally DNA or RNA

SEQ ID NO: 2931 - DNA, 103 bp, synthetic construct; identical to SEQ ID NO: 1797
  source 1..103: mol_type = other DNA
  modified_base 1: mod_base = OTHER; note = 2'-O-methyl ribonucleotide
  modified_base 2: mod_base = OTHER; note = 2'-O-methyl ribonucleotide
  modified_base 3: mod_base = OTHER; note = 2'-O-methyl ribonucleotide
  modified_base 21: mod_base = OTHER; note = 2'-O-methyl ribonucleotide
  modified_base 28: mod_base = OTHER; note = 2'-O-methyl ribonucleotide
  modified_base 29: mod_base = OTHER; note = 2'-O-methyl ribonucleotide
  modified_base 30: mod_base = OTHER; note = 2'-O-methyl ribonucleotide
  modified_base 31: mod_base = OTHER; note = 2'-O-methyl ribonucleotide
  modified_base 32: mod_base = OTHER; note = 2'-O-methyl ribonucleotide
  modified_base 34: mod_base = OTHER; note = 2'-O-methyl ribonucleotide
  modified_base 35: mod_base = OTHER; note = 2'-O-methyl ribonucleotide
  modified_base 36: mod_base = OTHER; note = 2'-O-methyl ribonucleotide
  modified_base 37: mod_base = OTHER; note = 2'-O-methyl ribonucleotide
  modified_base 38: mod_base = OTHER; note = 2'-O-methyl ribonucleotide
  modified_base 39: mod_base = OTHER; note = 2'-O-methyl ribonucleotide
  modified_base 40: mod_base = OTHER; note = 2'-O-methyl ribonucleotide
  modified_base 41: mod_base = OTHER; note = 2'-O-methyl ribonucleotide
  modified_base 42: mod_base = OTHER; note = 2'-O-methyl ribonucleotide
  modified_base 46: mod_base = OTHER; note = 2'-O-methyl ribonucleotide
  modified_base 48: mod_base = OTHER; note = 2'-O-methyl ribonucleotide
  modified_base 50: mod_base = OTHER; note = 2'-O-methyl ribonucleotide
  modified_base 52: mod_base = OTHER; note = 2'-O-methyl ribonucleotide
  modified_base 53: mod_base = OTHER; note = 2'-O-methyl ribonucleotide
  modified_base 54: mod_base = OTHER; note = 2'-O-methyl ribonucleotide
  modified_base 57: mod_base = OTHER; note = 2'-O-methyl ribonucleotide
  modified_base 61: mod_base = OTHER; note = 2'-O-methyl ribonucleotide
  modified_base 66: mod_base = OTHER; note = 2'-O-methyl ribonucleotide
  modified_base 67: mod_base = OTHER; note = 2'-O-methyl ribonucleotide
  modified_base 70: mod_base = OTHER; note = 2'-O-methyl ribonucleotide
  modified_base 71: mod_base = OTHER; note = 2'-O-methyl ribonucleotide
  modified_base 72: mod_base = OTHER; note = 2'-O-methyl ribonucleotide
  modified_base 73: mod_base = OTHER; note = 2'-O-methyl ribonucleotide
  modified_base 74: mod_base = OTHER; note = 2'-O-methyl ribonucleotide
  modified_base 75: mod_base = OTHER; note = 2'-O-methyl ribonucleotide
  modified_base 76: mod_base = OTHER; note = 2'-O-methyl ribonucleotide
  modified_base 77: mod_base = OTHER; note = 2'-O-methyl ribonucleotide
  modified_base 78: mod_base = OTHER; note = 2'-O-methyl ribonucleotide
  modified_base 79: mod_base = OTHER; note = 2'-O-methyl ribonucleotide
  modified_base 80: mod_base = OTHER; note = 2'-O-methyl ribonucleotide
  modified_base 82: mod_base = OTHER; note = 2'-O-methyl ribonucleotide
  modified_base 83: mod_base = OTHER; note = 2'-O-methyl ribonucleotide
  modified_base 84: mod_base = OTHER; note = 2'-O-methyl ribonucleotide
  modified_base 85: mod_base = OTHER; note = 2'-O-methyl ribonucleotide
  modified_base 86: mod_base = OTHER; note = 2'-O-methyl ribonucleotide
  modified_base 87: mod_base = OTHER; note = 2'-O-methyl ribonucleotide
  modified_base 89: mod_base = OTHER; note = 2'-O-methyl ribonucleotide
  modified_base 91: mod_base = OTHER; note = 2'-O-methyl ribonucleotide
  modified_base 92: mod_base = OTHER; note = 2'-O-methyl ribonucleotide
  modified_base 93: mod_base = OTHER; note = 2'-O-methyl ribonucleotide
  modified_base 94: mod_base = OTHER; note = 2'-O-methyl ribonucleotide
  modified_base 95: mod_base = OTHER; note = 2'-O-methyl ribonucleotide
  modified_base 96: mod_base = OTHER; note = 2'-O-methyl ribonucleotide
  modified_base 97: mod_base = OTHER; note = 2'-O-methyl ribonucleotide
  modified_base 98: mod_base = OTHER; note = 2'-O-methyl ribonucleotide
  modified_base 99: mod_base = OTHER; note = 2'-O-methyl ribonucleotide
  modified_base 100: mod_base = OTHER; note = 2'-O-methyl ribonucleotide
  modified_base 101: mod_base = OTHER; note = uniform ribonucleotides (A, C, G, inosine or U), deoxynucleotides (A, G, C, inosine or T), ribonebularine, 2'-O-methylnebularine or deoxynebularine
  modified_base 102: mod_base = OTHER; note = uniform ribonucleotides (A, C, G, inosine or U), deoxynucleotides (A, G, C, inosine or T), ribonebularine, 2'-O-methylnebularine or deoxynebularine
  modified_base 103: mod_base = OTHER; note = uniform ribonucleotides (A, C, G, inosine or U), deoxynucleotides (A, G, C, inosine or T), ribonebularine, 2'-O-methylnebularine or deoxynebularine
  modified_base 1..3: mod_base = OTHER; note = phosphorothioate linkage
  modified_base 25..26: mod_base = OTHER; note = phosphorothioate linkage
  modified_base 97..100: mod_base = OTHER; note = phosphorothioate linkage
  misc_feature 1..100: note = RNA
  misc_feature 101..103: note = Optionally DNA or RNA

SEQ ID NO: 2932 - DNA, 103 bp, synthetic construct; identical to SEQ ID NO: 1797
  source 1..103: mol_type = other DNA
  modified_base 1: mod_base = OTHER; note = 2'-O-methyl ribonucleotide
  modified_base 2: mod_base = OTHER; note = 2'-O-methyl ribonucleotide
  modified_base 3: mod_base = OTHER; note = 2'-O-methyl ribonucleotide
  modified_base 21: mod_base = OTHER; note = 2'-O-methyl ribonucleotide
  modified_base 28: mod_base = OTHER; note = 2'-O-methyl ribonucleotide
  modified_base 29: mod_base = OTHER; note = 2'-O-methyl ribonucleotide
  modified_base 30: mod_base = OTHER; note = 2'-O-methyl ribonucleotide
  modified_base 31: mod_base = OTHER; note = 2'-O-methyl ribonucleotide
  modified_base 32: mod_base = OTHER; note = 2'-O-methyl ribonucleotide
  modified_base 34: mod_base = OTHER; note = 2'-O-methyl ribonucleotide
  modified_base 35: mod_base = OTHER; note = 2'-O-methyl ribonucleotide
  modified_base 36: mod_base = OTHER; note = 2'-O-methyl ribonucleotide
  modified_base 37: mod_base = OTHER; note = 2'-O-methyl ribonucleotide
  modified_base 38: mod_base = OTHER; note = 2'-O-methyl ribonucleotide
  modified_base 39: mod_base = OTHER; note = 2'-O-methyl ribonucleotide
  modified_base 40: mod_base = OTHER; note = 2'-O-methyl ribonucleotide
  modified_base 41: mod_base = OTHER; note = 2'-O-methyl ribonucleotide
  modified_base 42: mod_base = OTHER; note = 2'-O-methyl ribonucleotide
  modified_base 46: mod_base = OTHER; note = 2'-O-methyl ribonucleotide
  modified_base 48: mod_base = OTHER; note = 2'-O-methyl ribonucleotide
  modified_base 50: mod_base = OTHER; note = 2'-O-methyl ribonucleotide
  modified_base 52: mod_base = OTHER; note = 2'-O-methyl ribonucleotide
  modified_base 53: mod_base = OTHER; note = 2'-O-methyl ribonucleotide
  modified_base 54: mod_base = OTHER; note = 2'-O-methyl ribonucleotide
  modified_base 55: mod_base = OTHER; note = 2'-O-methyl ribonucleotide
  modified_base 56: mod_base = OTHER; note = 2'-O-methyl ribonucleotide
  modified_base 57: mod_base = OTHER; note = 2'-O-methyl ribonucleotide
  modified_base 60: mod_base = OTHER; note = 2'-O-methyl ribonucleotide
  modified_base 61: mod_base = OTHER; note = 2'-O-methyl ribonucleotide
  modified_base 66: mod_base = OTHER; note = 2'-O-methyl ribonucleotide
  modified_base 67: mod_base = OTHER; note = 2'-O-methyl ribonucleotide
  modified_base 70: mod_base = OTHER; note = 2'-O-methyl ribonucleotide
  modified_base 71: mod_base = OTHER; note = 2'-O-methyl ribonucleotide
  modified_base 72: mod_base = OTHER; note = 2'-O-methyl ribonucleotide
  modified_base 74: mod_base = OTHER; note = 2'-O-methyl ribonucleotide
  modified_base 75: mod_base = OTHER; note = 2'-O-methyl ribonucleotide
  modified_base 76: mod_base = OTHER; note = 2'-O-methyl ribonucleotide
  modified_base 77: mod_base = OTHER; note = 2'-O-methyl ribonucleotide
  modified_base 78: mod_base = OTHER; note = 2'-O-methyl ribonucleotide
  modified_base 79: mod_base = OTHER; note = 2'-O-methyl ribonucleotide
  modified_base 80: mod_base = OTHER; note = 2'-O-methyl ribonucleotide
  modified_base 82: mod_base = OTHER; note = 2'-O-methyl ribonucleotide
  modified_base 83: mod_base = OTHER; note = 2'-O-methyl ribonucleotide
  modified_base 84: mod_base = OTHER; note = 2'-O-methyl ribonucleotide
  modified_base 85: mod_base = OTHER; note = 2'-O-methyl ribonucleotide
  modified_base 86: mod_base = OTHER; note = 2'-O-methyl ribonucleotide
  modified_base 87: mod_base = OTHER; note = 2'-O-methyl ribonucleotide
  modified_base 89: mod_base = OTHER; note = 2'-O-methyl ribonucleotide
  modified_base 92: mod_base = OTHER; note = 2'-O-methyl ribonucleotide
  modified_base 93: mod_base = OTHER; note = 2'-O-methyl ribonucleotide
  modified_base 94: mod_base = OTHER; note = 2'-O-methyl ribonucleotide
  modified_base 95: mod_base = OTHER; note = 2'-O-methyl ribonucleotide
  modified_base 96: mod_base = OTHER; note = 2'-O-methyl ribonucleotide
  modified_base 97: mod_base = OTHER; note = 2'-O-methyl ribonucleotide
  modified_base 98: mod_base = OTHER; note = 2'-O-methyl ribonucleotide
  modified_base 99: mod_base = OTHER; note = 2'-O-methyl ribonucleotide
  modified_base 100: mod_base = OTHER; note = 2'-O-methyl ribonucleotide
  modified_base 101: mod_base = OTHER; note = uniform ribonucleotides (A, C, G, inosine or U), deoxynucleotides (A, G, C, inosine or T), ribonebularine, 2'-O-methylnebularine or deoxynebularine
  modified_base 102: mod_base = OTHER; note = uniform ribonucleotides (A, C, G, inosine or U), deoxynucleotides (A, G, C, inosine or T), ribonebularine, 2'-O-methylnebularine or deoxynebularine
  modified_base 103: mod_base = OTHER; note = uniform ribonucleotides (A, C, G, inosine or U), deoxynucleotides (A, G, C, inosine or T), ribonebularine, 2'-O-methylnebularine or deoxynebularine
  modified_base 1..3: mod_base = OTHER; note = phosphorothioate linkage
  modified_base 25..26: mod_base = OTHER; note = phosphorothioate linkage
  modified_base 97..100: mod_base = OTHER; note = phosphorothioate linkage
  misc_feature 1..100: note = RNA
  misc_feature 101..103: note = Optionally DNA or RNA

SEQ ID NO: 2933 - DNA, 103 bp, synthetic construct; identical to SEQ ID NO: 1795
  source 1..103: mol_type = other DNA
  modified_base 1: mod_base = OTHER; note = 2'-O-methyl ribonucleotide
  modified_base 2: mod_base = OTHER; note = 2'-O-methyl ribonucleotide
  modified_base 3: mod_base = OTHER; note = 2'-O-methyl ribonucleotide
  modified_base 21: mod_base = OTHER; note = 2'-O-methyl ribonucleotide
  modified_base 28: mod_base = OTHER; note = 2'-O-methyl ribonucleotide
  modified_base 29: mod_base = OTHER; note = 2'-O-methyl ribonucleotide
  modified_base 30: mod_base = OTHER; note = 2'-O-methyl ribonucleotide
  modified_base 31: mod_base = OTHER; note = 2'-O-methyl ribonucleotide
  modified_base 32: mod_base = OTHER; note = 2'-O-methyl ribonucleotide
  modified_base 33: mod_base = OTHER; note = 2'-O-methyl ribonucleotide
  modified_base 34: mod_base = OTHER; note = 2'-O-methyl ribonucleotide
  modified_base 35: mod_base = OTHER; note = 2'-O-methyl ribonucleotide
  modified_base 36: mod_base = OTHER; note = 2'-O-methyl ribonucleotide
  modified_base 37: mod_base = OTHER; note = 2'-O-methyl ribonucleotide
  modified_base 38: mod_base = OTHER; note = 2'-O-methyl ribonucleotide
  modified_base 39: mod_base = OTHER; note = 2'-O-methyl ribonucleotide
  modified_base 40: mod_base = OTHER; note = 2'-O-methyl ribonucleotide
  modified_base 41: mod_base = OTHER; note = 2'-O-methyl ribonucleotide
  modified_base 42: mod_base = OTHER; note = 2'-O-methyl ribonucleotide
  modified_base 46: mod_base = OTHER; note = 2'-O-methyl ribonucleotide
  modified_base 48: mod_base = OTHER; note = 2'-O-methyl ribonucleotide
  modified_base 50: mod_base = OTHER; note = 2'-O-methyl ribonucleotide
  modified_base 52: mod_base = OTHER; note = 2'-O-methyl ribonucleotide
  modified_base 53: mod_base = OTHER; note = 2'-O-methyl ribonucleotide
  modified_base 54: mod_base = OTHER; note = 2'-O-methyl ribonucleotide
  modified_base 55: mod_base = OTHER; note = 2'-O-methyl ribonucleotide
  modified_base 56: mod_base = OTHER; note = 2'-O-methyl ribonucleotide
  modified_base 57: mod_base = OTHER; note = 2'-O-methyl ribonucleotide
  modified_base 60: mod_base = OTHER; note = 2'-O-methyl ribonucleotide
  modified_base 61: mod_base = OTHER; note = 2'-O-methyl ribonucleotide
  modified_base 66: mod_base = OTHER; note = 2'-O-methyl ribonucleotide
  modified_base 67: mod_base = OTHER; note = 2'-O-methyl ribonucleotide
  modified_base 70: mod_base = OTHER; note = 2'-O-methyl ribonucleotide
  modified_base 71: mod_base = OTHER; note = 2'-O-methyl ribonucleotide
  modified_base 72: mod_base = OTHER; note = 2'-O-methyl ribonucleotide
  modified_base 73: mod_base = OTHER; note = 2'-O-methyl ribonucleotide
  modified_base 74: mod_base = OTHER; note = 2'-O-methyl ribonucleotide
  modified_base 75: mod_base = OTHER; note = 2'-O-methyl ribonucleotide
  modified_base 76: mod_base = OTHER; note = 2'-O-methyl ribonucleotide
  modified_base 77: mod_base = OTHER; note = 2'-O-methyl ribonucleotide
  modified_base 78: mod_base = OTHER; note = 2'-O-methyl ribonucleotide
  modified_base 79: mod_base = OTHER; note = 2'-O-methyl ribonucleotide
  modified_base 80: mod_base = OTHER; note = 2'-O-methyl ribonucleotide
  modified_base 81: mod_base = OTHER; note = 2'-O-methyl ribonucleotide
  modified_base 83: mod_base = OTHER; note = 2'-O-methyl ribonucleotide
  modified_base 84: mod_base = OTHER; note = 2'-O-methyl ribonucleotide
  modified_base 85: mod_base = OTHER; note = 2'-O-methyl ribonucleotide
  modified_base 86: mod_base = OTHER; note = 2'-O-methyl ribonucleotide
  modified_base 87: mod_base = OTHER; note = 2'-O-methyl ribonucleotide
  modified_base 88: mod_base = OTHER; note = 2'-O-methyl ribonucleotide
  modified_base 89: mod_base = OTHER; note = 2'-O-methyl ribonucleotide
  modified_base 90: mod_base = OTHER; note = 2'-O-methyl ribonucleotide
  modified_base 91: mod_base = OTHER; note = 2'-O-methyl ribonucleotide
  modified_base 92: mod_base = OTHER; note = 2'-O-methyl ribonucleotide
  modified_base 93: mod_base = OTHER; note = 2'-O-methyl ribonucleotide
  modified_base 94: mod_base = OTHER; note = 2'-O-methyl ribonucleotide
  modified_base 95: mod_base = OTHER; note = 2'-O-methyl ribonucleotide
  modified_base 96: mod_base = OTHER; note = 2'-O-methyl ribonucleotide
  modified_base 97: mod_base = OTHER; note = 2'-O-methyl ribonucleotide
  modified_base 98: mod_base = OTHER; note = 2'-O-methyl ribonucleotide
  modified_base 99: mod_base = OTHER; note = 2'-O-methyl ribonucleotide
  modified_base 100: mod_base = OTHER; note = 2'-O-methyl ribonucleotide
  modified_base 101: mod_base = OTHER; note = uniform ribonucleotides (A, C, G, inosine or U), deoxynucleotides (A, G, C, inosine or T), ribonebularine, 2'-O-methylnebularine or deoxynebularine
  modified_base 102: mod_base = OTHER; note = uniform ribonucleotides (A, C, G, inosine or U), deoxynucleotides (A, G, C, inosine or T), ribonebularine, 2'-O-methylnebularine or deoxynebularine
  modified_base 103: mod_base = OTHER; note = uniform ribonucleotides (A, C, G, inosine or U), deoxynucleotides (A, G, C, inosine or T), ribonebularine, 2'-O-methylnebularine or deoxynebularine
  modified_base 1..3: mod_base = OTHER; note = phosphorothioate linkage
  modified_base 45..46: mod_base = OTHER; note = phosphorothioate linkage
  modified_base 64..65: mod_base = OTHER; note = phosphorothioate linkage
  modified_base 97..100: mod_base = OTHER; note = phosphorothioate linkage
  misc_feature 1..100: note = RNA
  misc_feature 101..103: note = Optionally DNA or RNA

SEQ ID NO: 2934 - DNA, 103 bp, synthetic construct; identical to SEQ ID NO: 1795
  source 1..103: mol_type = other DNA
  modified_base 1: mod_base = OTHER; note = 2'-O-methyl ribonucleotide
  modified_base 2: mod_base = OTHER; note = 2'-O-methyl ribonucleotide
  modified_base 3: mod_base = OTHER; note = 2'-O-methyl ribonucleotide
  modified_base 21: mod_base = OTHER; note = 2'-O-methyl ribonucleotide
  modified_base 28: mod_base = OTHER; note = 2'-O-methyl ribonucleotide
  modified_base 29: mod_base = OTHER; note = 2'-O-methyl ribonucleotide
  modified_base 30: mod_base = OTHER; note = 2'-O-methyl ribonucleotide
  modified_base 31: mod_base = OTHER; note = 2'-O-methyl ribonucleotide
  modified_base 32: mod_base = OTHER; note = 2'-O-methyl ribonucleotide
  modified_base 34: mod_base = OTHER; note = 2'-O-methyl ribonucleotide
  modified_base 35: mod_base = OTHER; note = 2'-O-methyl ribonucleotide
  modified_base 36: mod_base = OTHER; note = 2'-O-methyl ribonucleotide
  modified_base 37: mod_base = OTHER; note = 2'-O-methyl ribonucleotide
  modified_base 38: mod_base = OTHER; note = 2'-O-methyl ribonucleotide
  modified_base 39: mod_base = OTHER; note = 2'-O-methyl ribonucleotide
  modified_base 40: mod_base = OTHER; note = 2'-O-methyl ribonucleotide
  modified_base 41: mod_base = OTHER; note = 2'-O-methyl ribonucleotide
  modified_base 42: mod_base = OTHER; note = 2'-O-methyl ribonucleotide
  modified_base 46: mod_base = OTHER; note = 2'-O-methyl ribonucleotide
  modified_base 48: mod_base = OTHER; note = 2'-O-methyl ribonucleotide
  modified_base 50: mod_base = OTHER; note = 2'-O-methyl ribonucleotide
  modified_base 52: mod_base = OTHER; note = 2'-O-methyl ribonucleotide
  modified_base 53: mod_base = OTHER; note = 2'-O-methyl ribonucleotide
  modified_base 54: mod_base = OTHER; note = 2'-O-methyl ribonucleotide
  modified_base 55: mod_base = OTHER; note = 2'-O-methyl ribonucleotide
  modified_base 56: mod_base = OTHER; note = 2'-O-methyl ribonucleotide
  modified_base 57: mod_base = OTHER; note = 2'-O-methyl ribonucleotide
  modified_base 60: mod_base = OTHER; note = 2'-O-methyl ribonucleotide
  modified_base 61: mod_base = OTHER; note = 2'-O-methyl ribonucleotide
  modified_base 66: mod_base = OTHER; note = 2'-O-methyl ribonucleotide
  modified_base 67: mod_base = OTHER; note = 2'-O-methyl ribonucleotide
  modified_base 70: mod_base = OTHER; note = 2'-O-methyl ribonucleotide
  modified_base 71: mod_base = OTHER; note = 2'-O-methyl ribonucleotide
  modified_base 72: mod_base = OTHER; note = 2'-O-methyl ribonucleotide
  modified_base 74: mod_base = OTHER; note = 2'-O-methyl ribonucleotide
  modified_base 75: mod_base = OTHER; note = 2'-O-methyl ribonucleotide
  modified_base 76: mod_base = OTHER; note = 2'-O-methyl ribonucleotide
  modified_base 77: mod_base = OTHER; note = 2'-O-methyl ribonucleotide
  modified_base 78: mod_base = OTHER; note = 2'-O-methyl ribonucleotide
  modified_base 79: mod_base = OTHER; note = 2'-O-methyl ribonucleotide
  modified_base 80: mod_base = OTHER; note = 2'-O-methyl ribonucleotide
  modified_base 81: mod_base = OTHER; note = 2'-O-methyl ribonucleotide
  modified_base 83: mod_base = OTHER; note = 2'-O-methyl ribonucleotide
  modified_base 84: mod_base = OTHER; note = 2'-O-methyl ribonucleotide
  modified_base 85: mod_base = OTHER; note = 2'-O-methyl ribonucleotide
  modified_base 86: mod_base = OTHER; note = 2'-O-methyl ribonucleotide
  modified_base 87: mod_base = OTHER; note = 2'-O-methyl ribonucleotide
  modified_base 88: mod_base = OTHER; note = 2'-O-methyl ribonucleotide
  modified_base 89: mod_base = OTHER; note = 2'-O-methyl ribonucleotide
  modified_base 90: mod_base = OTHER; note = 2'-O-methyl ribonucleotide
  modified_base 91: mod_base = OTHER; note = 2'-O-methyl ribonucleotide
  modified_base 92: mod_base = OTHER; note = 2'-O-methyl ribonucleotide
  modified_base 93: mod_base = OTHER; note = 2'-O-methyl ribonucleotide
  modified_base 94: mod_base = OTHER; note = 2'-O-methyl ribonucleotide
  modified_base 95: mod_base = OTHER; note = 2'-O-methyl ribonucleotide
  modified_base 96: mod_base = OTHER; note = 2'-O-methyl ribonucleotide
  modified_base 97: mod_base = OTHER; note = 2'-O-methyl ribonucleotide
  modified_base 98: mod_base = OTHER; note = 2'-O-methyl ribonucleotide
  modified_base 99: mod_base = OTHER; note = 2'-O-methyl ribonucleotide
  modified_base 100: mod_base = OTHER; note = 2'-O-methyl ribonucleotide
  modified_base 101: mod_base = OTHER; note = uniform ribonucleotides (A, C, G, inosine or U), deoxynucleotides (A, G, C, inosine or T), ribonebularine, 2'-O-methylnebularine or deoxynebularine
  modified_base 102: mod_base = OTHER; note = uniform ribonucleotides (A, C, G, inosine or U), deoxynucleotides (A, G, C, inosine or T), ribonebularine, 2'-O-methylnebularine or deoxynebularine
  modified_base 103: mod_base = OTHER; note = uniform ribonucleotides (A, C, G, inosine or U), deoxynucleotides (A, G, C, inosine or T), ribonebularine, 2'-O-methylnebularine or deoxynebularine
  modified_base 1..3: mod_base = OTHER; note = phosphorothioate linkage
  modified_base 45..46: mod_base = OTHER; note = phosphorothioate linkage
  modified_base 64..65: mod_base = OTHER; note = phosphorothioate linkage
  modified_base 97..100: mod_base = OTHER; note = phosphorothioate linkage
  misc_feature 1..100: note = RNA
  misc_feature 101..103: note = Optionally DNA or RNA

SEQ ID NO: 2935 - DNA, 103 bp, synthetic construct; identical to SEQ ID NO: 1796
  source 1..103: mol_type = other DNA
  modified_base 1: mod_base = OTHER; note = 2'-O-methyl ribonucleotide
  modified_base 2: mod_base = OTHER; note = 2'-O-methyl ribonucleotide
  modified_base 3: mod_base = OTHER; note = 2'-O-methyl ribonucleotide
  modified_base 21: mod_base = OTHER; note = 2'-O-methyl ribonucleotide
  modified_base 28: mod_base = OTHER; note = 2'-O-methyl ribonucleotide
  modified_base 29: mod_base = OTHER; note = 2'-O-methyl ribonucleotide
  modified_base 30: mod_base = OTHER; note = 2'-O-methyl ribonucleotide
  modified_base 31: mod_base = OTHER; note = 2'-O-methyl ribonucleotide
  modified_base 32: mod_base = OTHER; note = 2'-O-methyl ribonucleotide
  modified_base 33: mod_base = OTHER; note = 2'-O-methyl ribonucleotide
  modified_base 34: mod_base = OTHER; note = 2'-O-methyl ribonucleotide
  modified_base 35: mod_base = OTHER; note = 2'-O-methyl ribonucleotide
  modified_base 36: mod_base = OTHER; note = 2'-O-methyl ribonucleotide
  modified_base 37: mod_base = OTHER; note = 2'-O-methyl ribonucleotide
  modified_base 38: mod_base = OTHER; note = 2'-O-methyl ribonucleotide
  modified_base 39: mod_base = OTHER; note = 2'-O-methyl ribonucleotide
  modified_base 40: mod_base = OTHER; note = 2'-O-methyl ribonucleotide
  modified_base 41: mod_base = OTHER; note = 2'-O-methyl ribonucleotide
  modified_base 42: mod_base = OTHER; note = 2'-O-methyl ribonucleotide
  modified_base 46: mod_base = OTHER; note = 2'-O-methyl ribonucleotide
  modified_base 48: mod_base = OTHER; note = 2'-O-methyl ribonucleotide
  modified_base 50: mod_base = OTHER; note = 2'-O-methyl ribonucleotide
  modified_base 52: mod_base = OTHER; note = 2'-O-methyl ribonucleotide
  modified_base 53: mod_base = OTHER; note = 2'-O-methyl ribonucleotide
  modified_base 54: mod_base = OTHER; note = 2'-O-methyl ribonucleotide
  modified_base 55: mod_base = OTHER; note = 2'-O-methyl ribonucleotide
  modified_base 56: mod_base = OTHER; note = 2'-O-methyl ribonucleotide
  modified_base 57: mod_base = OTHER; note = 2'-O-methyl ribonucleotide
  modified_base 60: mod_base = OTHER; note = 2'-O-methyl ribonucleotide
  modified_base 61: mod_base = OTHER; note = 2'-O-methyl ribonucleotide
  modified_base 66: mod_base = OTHER; note = 2'-O-methyl ribonucleotide
  modified_base 67: mod_base = OTHER; note = 2'-O-methyl ribonucleotide
  modified_base 70: mod_base = OTHER; note = 2'-O-methyl ribonucleotide
  modified_base 71: mod_base = OTHER; note = 2'-O-methyl ribonucleotide
  modified_base 72: mod_base = OTHER; note = 2'-O-methyl ribonucleotide
  modified_base 73: mod_base = OTHER; note = 2'-O-methyl ribonucleotide
  modified_base 74: mod_base = OTHER; note = 2'-O-methyl ribonucleotide
  modified_base 75: mod_base = OTHER; note = 2'-O-methyl ribonucleotide
  modified_base 76: mod_base = OTHER; note = 2'-O-methyl ribonucleotide
  modified_base 77: mod_base = OTHER; note = 2'-O-methyl ribonucleotide
  modified_base 78: mod_base = OTHER; note = 2'-O-methyl ribonucleotide
  modified_base 79: mod_base = OTHER; note = 2'-O-methyl ribonucleotide
  modified_base 80: mod_base = OTHER; note = 2'-O-methyl ribonucleotide
  modified_base 81: mod_base = OTHER; note = 2'-O-methyl ribonucleotide
  modified_base 83: mod_base = OTHER; note = 2'-O-methyl ribonucleotide
  modified_base 84: mod_base = OTHER; note = 2'-O-methyl ribonucleotide
  modified_base 85: mod_base = OTHER; note = 2'-O-methyl ribonucleotide
  modified_base 86: mod_base = OTHER; note = 2'-O-methyl ribonucleotide
  modified_base 87: mod_base = OTHER; note = 2'-O-methyl ribonucleotide
  modified_base 88: mod_base = OTHER; note = 2'-O-methyl ribonucleotide
  modified_base 89: mod_base = OTHER; note = 2'-O-methyl ribonucleotide
  modified_base 90: mod_base = OTHER; note = 2'-O-methyl ribonucleotide
  modified_base 91: mod_base = OTHER; note = 2'-O-methyl ribonucleotide
  modified_base 92: mod_base = OTHER; note = 2'-O-methyl ribonucleotide
  modified_base 93: mod_base = OTHER; note = 2'-O-methyl ribonucleotide
  modified_base 94: mod_base = OTHER; note = 2'-O-methyl ribonucleotide
  modified_base 95: mod_base = OTHER; note = 2'-O-methyl ribonucleotide
  modified_base 96: mod_base = OTHER; note = 2'-O-methyl ribonucleotide
  modified_base 97: mod_base = OTHER; note = 2'-O-methyl ribonucleotide
  modified_base 98: mod_base = OTHER; note = 2'-O-methyl ribonucleotide
  modified_base 99: mod_base = OTHER; note = 2'-O-methyl ribonucleotide
  modified_base 100: mod_base = OTHER; note = 2'-O-methyl ribonucleotide
  modified_base 101: mod_base = OTHER; note = uniform ribonucleotides (A, C, G, inosine or U), deoxynucleotides (A, G, C, inosine or T), ribonebularine, 2'-O-methylnebularine or deoxynebularine
  modified_base 102: mod_base = OTHER; note = uniform ribonucleotides (A, C, G, inosine or U), deoxynucleotides (A, G, C, inosine or T), ribonebularine, 2'-O-methylnebularine or deoxynebularine
  modified_base 103: mod_base = OTHER; note = uniform ribonucleotides (A, C, G, inosine or U), deoxynucleotides (A, G, C, inosine or T), ribonebularine, 2'-O-methylnebularine or deoxynebularine
  modified_base 1..3: mod_base = OTHER; note = phosphorothioate linkage
  modified_base 45..46: mod_base = OTHER; note = phosphorothioate linkage
  modified_base 64..65: mod_base = OTHER; note = phosphorothioate linkage
  modified_base 97..100: mod_base = OTHER; note = phosphorothioate linkage
  misc_feature 1..100: note = RNA
  misc_feature 101..103: note = Optionally DNA or RNA

SEQ ID NO: 2936 - DNA, 103 bp, synthetic construct; identical to SEQ ID NO: 1796
  source 1..103: mol_type = other DNA
  modified_base 1: mod_base = OTHER; note = 2'-O-methyl ribonucleotide
  modified_base 2: mod_base = OTHER; note = 2'-O-methyl ribonucleotide
  modified_base 3: mod_base = OTHER; note = 2'-O-methyl ribonucleotide
  modified_base 21: mod_base = OTHER; note = 2'-O-methyl ribonucleotide
  modified_base 28: mod_base = OTHER; note = 2'-O-methyl ribonucleotide
  modified_base 29: mod_base = OTHER; note = 2'-O-methyl ribonucleotide
  modified_base 30: mod_base = OTHER; note = 2'-O-methyl ribonucleotide
  modified_base 31: mod_base = OTHER; note = 2'-O-methyl ribonucleotide
  modified_base 32: mod_base = OTHER; note = 2'-O-methyl ribonucleotide
  modified_base 34: mod_base = OTHER; note = 2'-O-methyl ribonucleotide
  modified_base 35: mod_base = OTHER; note = 2'-O-methyl ribonucleotide
  modified_base 36: mod_base = OTHER; note = 2'-O-methyl ribonucleotide
  modified_base 37: mod_base = OTHER; note = 2'-O-methyl ribonucleotide
  modified_base 38: mod_base = OTHER; note = 2'-O-methyl ribonucleotide
  modified_base 39: mod_base = OTHER; note = 2'-O-methyl ribonucleotide
  modified_base 40: mod_base = OTHER; note = 2'-O-methyl ribonucleotide
  modified_base 41: mod_base = OTHER; note = 2'-O-methyl ribonucleotide
  modified_base 42: mod_base = OTHER; note = 2'-O-methyl ribonucleotide
  modified_base 46: mod_base = OTHER; note = 2'-O-methyl ribonucleotide
  modified_base 48: mod_base = OTHER; note = 2'-O-methyl ribonucleotide
  modified_base 50: mod_base = OTHER; note = 2'-O-methyl ribonucleotide
  modified_base 52: mod_base = OTHER; note = 2'-O-methyl ribonucleotide
  modified_base 53: mod_base = OTHER; note = 2'-O-methyl ribonucleotide
  modified_base 54: mod_base = OTHER; note = 2'-O-methyl ribonucleotide
  modified_base 55: mod_base = OTHER; note = 2'-O-methyl ribonucleotide
  modified_base 56: mod_base = OTHER; note = 2'-O-methyl ribonucleotide
  modified_base 57: mod_base = OTHER; note = 2'-O-methyl ribonucleotide
  modified_base 60: mod_base = OTHER; note = 2'-O-methyl ribonucleotide
  modified_base 61: mod_base = OTHER; note = 2'-O-methyl ribonucleotide
  modified_base 66: mod_base = OTHER; note = 2'-O-methyl ribonucleotide
  modified_base 67: mod_base = OTHER; note = 2'-O-methyl ribonucleotide
  modified_base 70: mod_base = OTHER; note = 2'-O-methyl ribonucleotide
  modified_base 71: mod_base = OTHER; note = 2'-O-methyl ribonucleotide
  modified_base 72: mod_base = OTHER; note = 2'-O-methyl ribonucleotide
  modified_base 74: mod_base = OTHER; note = 2'-O-methyl ribonucleotide
  modified_base 75: mod_base = OTHER; note = 2'-O-methyl ribonucleotide
  modified_base 76: mod_base = OTHER; note = 2'-O-methyl ribonucleotide
  modified_base 77: mod_base = OTHER; note = 2'-O-methyl ribonucleotide
  modified_base 78: mod_base = OTHER; note = 2'-O-methyl ribonucleotide
  modified_base 79: mod_base = OTHER; note = 2'-O-methyl ribonucleotide
  modified_base 80: mod_base = OTHER; note = 2'-O-methyl ribonucleotide
  modified_base 81: mod_base = OTHER; note = 2'-O-methyl ribonucleotide
  modified_base 83: mod_base = OTHER; note = 2'-O-methyl ribonucleotide
  modified_base 84: mod_base = OTHER; note = 2'-O-methyl ribonucleotide
  modified_base 85: mod_base = OTHER; note = 2'-O-methyl ribonucleotide
  modified_base 86: mod_base = OTHER; note = 2'-O-methyl ribonucleotide
  modified_base 87: mod_base = OTHER; note = 2'-O-methyl ribonucleotide
  modified_base 88: mod_base = OTHER; note = 2'-O-methyl ribonucleotide
  modified_base 89: mod_base = OTHER; note = 2'-O-methyl ribonucleotide
  modified_base 90: mod_base = OTHER; note = 2'-O-methyl ribonucleotide
  modified_base 91: mod_base = OTHER; note = 2'-O-methyl ribonucleotide
  modified_base 92: mod_base = OTHER; note = 2'-O-methyl ribonucleotide
  modified_base 93: mod_base = OTHER; note = 2'-O-methyl ribonucleotide
  modified_base 94: mod_base = OTHER; note = 2'-O-methyl ribonucleotide
  modified_base 95: mod_base = OTHER; note = 2'-O-methyl ribonucleotide
  modified_base 96: mod_base = OTHER; note = 2'-O-methyl ribonucleotide
  modified_base 97: mod_base = OTHER; note = 2'-O-methyl ribonucleotide
  modified_base 98: mod_base = OTHER; note = 2'-O-methyl ribonucleotide
  modified_base 99: mod_base = OTHER; note = 2'-O-methyl ribonucleotide
  modified_base 100: mod_base = OTHER; note = 2'-O-methyl ribonucleotide
  modified_base 101: mod_base = OTHER; note = uniform ribonucleotides (A, C, G, inosine or U), deoxynucleotides (A, G, C, inosine or T), ribonebularine, 2'-O-methylnebularine or deoxynebularine
  modified_base 102: mod_base = OTHER; note = uniform ribonucleotides (A, C, G, inosine or U), deoxynucleotides (A, G, C, inosine or T), ribonebularine, 2'-O-methylnebularine or deoxynebularine
  modified_base 103: mod_base = OTHER; note = uniform ribonucleotides (A, C, G, inosine or U), deoxynucleotides (A, G, C, inosine or T), ribonebularine, 2'-O-methylnebularine or deoxynebularine
  modified_base 1..3: mod_base = OTHER; note = phosphorothioate linkage
  modified_base 45..46: mod_base = OTHER; note = phosphorothioate linkage
  modified_base 64..65: mod_base = OTHER; note = phosphorothioate linkage
  modified_base 97..100: mod_base = OTHER; note = phosphorothioate linkage
  misc_feature 1..100: note = RNA
  misc_feature 101..103: note = Optionally DNA or RNA

SEQ ID NO: 2937 - DNA, 103 bp, synthetic construct; identical to SEQ ID NO: 1797
  source 1..103: mol_type = other DNA
  modified_base 1: mod_base = OTHER; note = 2'-O-methyl ribonucleotide
  modified_base 2: mod_base = OTHER; note = 2'-O-methyl ribonucleotide
  modified_base 3: mod_base = OTHER; note = 2'-O-methyl ribonucleotide
  modified_base 21: mod_base = OTHER; note = 2'-O-methyl ribonucleotide
  modified_base 28: mod_base = OTHER; note = 2'-O-methyl ribonucleotide
  modified_base 29: mod_base = OTHER; note = 2'-O-methyl ribonucleotide
  modified_base 30: mod_base = OTHER; note = 2'-O-methyl ribonucleotide
  modified_base 31: mod_base = OTHER; note = 2'-O-methyl ribonucleotide
  modified_base 32: mod_base = OTHER; note = 2'-O-methyl ribonucleotide
  modified_base 33: mod_base = OTHER; note = 2'-O-methyl ribonucleotide
  modified_base 34: mod_base = OTHER; note = 2'-O-methyl ribonucleotide
  modified_base 35: mod_base = OTHER; note = 2'-O-methyl ribonucleotide
  modified_base 36: mod_base = OTHER; note = 2'-O-methyl ribonucleotide
  modified_base 37: mod_base = OTHER; note = 2'-O-methyl ribonucleotide
  modified_base 38: mod_base = OTHER; note = 2'-O-methyl ribonucleotide
  modified_base 39: mod_base = OTHER; note = 2'-O-methyl ribonucleotide
  modified_base 40: mod_base = OTHER; note = 2'-O-methyl ribonucleotide
  modified_base 41: mod_base = OTHER; note = 2'-O-methyl ribonucleotide
  modified_base 42: mod_base = OTHER; note = 2'-O-methyl ribonucleotide
  modified_base 46: mod_base = OTHER; note = 2'-O-methyl ribonucleotide
  modified_base 48: mod_base = OTHER; note = 2'-O-methyl ribonucleotide
  modified_base 50: mod_base = OTHER; note = 2'-O-methyl ribonucleotide
  modified_base 52: mod_base = OTHER; note = 2'-O-methyl ribonucleotide
  modified_base 53: mod_base = OTHER; note = 2'-O-methyl ribonucleotide
  modified_base 54: mod_base = OTHER; note = 2'-O-methyl ribonucleotide
  modified_base 57: mod_base = OTHER; note = 2'-O-methyl ribonucleotide
  modified_base 61: mod_base = OTHER; note = 2'-O-methyl ribonucleotide
  modified_base 66: mod_base = OTHER; note = 2'-O-methyl ribonucleotide
  modified_base 67: mod_base = OTHER; note = 2'-O-methyl ribonucleotide
  modified_base 70: mod_base = OTHER; note = 2'-O-methyl ribonucleotide
  modified_base 71: mod_base = OTHER; note = 2'-O-methyl ribonucleotide
  modified_base 72: mod_base = OTHER; note = 2'-O-methyl ribonucleotide
  modified_base 74: mod_base = OTHER; note = 2'-O-methyl ribonucleotide
  modified_base 75: mod_base = OTHER; note = 2'-O-methyl ribonucleotide
  modified_base 76: mod_base = OTHER; note = 2'-O-methyl ribonucleotide
  modified_base 77: mod_base = OTHER; note = 2'-O-methyl ribonucleotide
  modified_base 78: mod_base = OTHER; note = 2'-O-methyl ribonucleotide
  modified_base 79: mod_base = OTHER; note = 2'-O-methyl ribonucleotide
  modified_base 80: mod_base = OTHER; note = 2'-O-methyl ribonucleotide
  modified_base 82: mod_base = OTHER; note = 2'-O-methyl ribonucleotide
  modified_base 83: mod_base = OTHER; note = 2'-O-methyl ribonucleotide
  modified_base 84: mod_base = OTHER; note = 2'-O-methyl ribonucleotide
  modified_base 85: mod_base = OTHER; note = 2'-O-methyl ribonucleotide
  modified_base 86: mod_base = OTHER; note = 2'-O-methyl ribonucleotide
  modified_base 87: mod_base = OTHER; note = 2'-O-methyl ribonucleotide
  modified_base 89: mod_base = OTHER; note = 2'-O-methyl ribonucleotide
  modified_base 92: mod_base = OTHER; note = 2'-O-methyl ribonucleotide
  modified_base 93: mod_base = OTHER; note = 2'-O-methyl ribonucleotide
  modified_base 94: mod_base = OTHER; note = 2'-O-methyl ribonucleotide
  modified_base 95: mod_base = OTHER; note = 2'-O-methyl ribonucleotide
  modified_base 96: mod_base = OTHER; note = 2'-O-methyl ribonucleotide
  modified_base 97: mod_base = OTHER; note = 2'-O-methyl ribonucleotide
  modified_base 98: mod_base = OTHER; note = 2'-O-methyl ribonucleotide
  modified_base 99: mod_base = OTHER; note = 2'-O-methyl ribonucleotide
  modified_base 100: mod_base = OTHER; note = 2'-O-methyl ribonucleotide
  modified_base 101: mod_base = OTHER; note = uniform ribonucleotides (A, C, G, inosine or U), deoxynucleotides (A, G, C, inosine or T), ribonebularine, 2'-O-methylnebularine or deoxynebularine
  modified_base 102: mod_base = OTHER; note = uniform ribonucleotides (A, C, G, inosine or U), deoxynucleotides (A, G, C, inosine or T), ribonebularine, 2'-O-methylnebularine or deoxynebularine
  modified_base 103: mod_base = OTHER; note = uniform ribonucleotides (A, C, G, inosine or U), deoxynucleotides (A, G, C, inosine or T), ribonebularine, 2'-O-methylnebularine or deoxynebularine
  modified_base 1..3: mod_base = OTHER; note = phosphorothioate linkage
  modified_base 45..46: mod_base = OTHER; note = phosphorothioate linkage
  modified_base 64..65: mod_base = OTHER; note = phosphorothioate linkage
  modified_base 97..100: mod_base = OTHER; note = phosphorothioate linkage
  misc_feature 1..100: note = RNA
  misc_feature 101..103: note = Optionally DNA or RNA

SEQ ID NO: 2938 - DNA, 103 bp, synthetic construct; identical to SEQ ID NO: 1797
  source 1..103: mol_type = other DNA
  modified_base 1: mod_base = OTHER; note = 2'-O-methyl ribonucleotide
  modified_base 2: mod_base = OTHER; note = 2'-O-methyl ribonucleotide
  modified_base 3: mod_base = OTHER; note = 2'-O-methyl ribonucleotide
  modified_base 21: mod_base = OTHER; note = 2'-O-methyl ribonucleotide
  modified_base 28: mod_base = OTHER; note = 2'-O-methyl ribonucleotide
  modified_base 29: mod_base = OTHER; note = 2'-O-methyl ribonucleotide
  modified_base 30: mod_base = OTHER; note = 2'-O-methyl ribonucleotide
  modified_base 31: mod_base = OTHER; note = 2'-O-methyl ribonucleotide
  modified_base 32: mod_base = OTHER; note = 2'-O-methyl ribonucleotide
  modified_base 33: mod_base = OTHER; note = 2'-O-methyl ribonucleotide
  modified_base 34: mod_base = OTHER; note = 2'-O-methyl ribonucleotide
  modified_base 35: mod_base = OTHER; note = 2'-O-methyl ribonucleotide
  modified_base 36: mod_base = OTHER; note = 2'-O-methyl ribonucleotide
  modified_base 37: mod_base = OTHER; note = 2'-O-methyl ribonucleotide
  modified_base 38: mod_base = OTHER; note = 2'-O-methyl ribonucleotide
  modified_base 39: mod_base = OTHER; note = 2'-O-methyl ribonucleotide
  modified_base 40: mod_base = OTHER; note = 2'-O-methyl ribonucleotide
  modified_base 41: mod_base = OTHER; note = 2'-O-methyl ribonucleotide
  modified_base 42: mod_base = OTHER; note = 2'-O-methyl ribonucleotide
  modified_base 46: mod_base = OTHER; note = 2'-O-methyl ribonucleotide
  modified_base 48: mod_base = OTHER; note = 2'-O-methyl ribonucleotide
  modified_base 50: mod_base = OTHER; note = 2'-O-methyl ribonucleotide
  modified_base 52: mod_base = OTHER; note = 2'-O-methyl ribonucleotide
  modified_base 53: mod_base = OTHER; note = 2'-O-methyl ribonucleotide
  modified_base 54: mod_base = OTHER; note = 2'-O-methyl ribonucleotide
  modified_base 55: mod_base = OTHER; note = 2'-O-methyl ribonucleotide
  modified_base 56: mod_base = OTHER; note = 2'-O-methyl ribonucleotide
  modified_base 57: mod_base = OTHER; note = 2'-O-methyl ribonucleotide
  modified_base 60: mod_base = OTHER; note = 2'-O-methyl ribonucleotide
  modified_base 61: mod_base = OTHER; note = 2'-O-methyl ribonucleotide
  modified_base 66: mod_base = OTHER; note = 2'-O-methyl ribonucleotide
  modified_base 67: mod_base = OTHER; note = 2'-O-methyl ribonucleotide
  modified_base 70: mod_base = OTHER; note = 2'-O-methyl ribonucleotide
  modified_base 71: mod_base = OTHER; note = 2'-O-methyl ribonucleotide
  modified_base 72: mod_base = OTHER; note = 2'-O-methyl ribonucleotide
  modified_base 74: mod_base = OTHER; note = 2'-O-methyl ribonucleotide
  modified_base 75: mod_base = OTHER; note = 2'-O-methyl ribonucleotide
  modified_base 76: mod_base = OTHER; note = 2'-O-methyl ribonucleotide
  modified_base 77: mod_base = OTHER; note = 2'-O-methyl ribonucleotide
  modified_base 78: mod_base = OTHER; note = 2'-O-methyl ribonucleotide
  modified_base 79: mod_base = OTHER; note = 2'-O-methyl ribonucleotide
  modified_base 80: mod_base = OTHER; note = 2'-O-methyl ribonucleotide
  modified_base 82: mod_base = OTHER; note = 2'-O-methyl ribonucleotide
  modified_base 83: mod_base = OTHER; note = 2'-O-methyl ribonucleotide
  modified_base 84: mod_base = OTHER; note = 2'-O-methyl ribonucleotide
  modified_base 85: mod_base = OTHER; note = 2'-O-methyl ribonucleotide
  modified_base 86: mod_base = OTHER; note = 2'-O-methyl ribonucleotide
  modified_base 87: mod_base = OTHER; note = 2'-O-methyl ribonucleotide
  modified_base 89: mod_base = OTHER; note = 2'-O-methyl ribonucleotide
  modified_base 92: mod_base = OTHER; note = 2'-O-methyl ribonucleotide
  modified_base 93: mod_base = OTHER; note = 2'-O-methyl ribonucleotide
  modified_base 94: mod_base = OTHER; note = 2'-O-methyl ribonucleotide
  modified_base 95: mod_base = OTHER; note = 2'-O-methyl ribonucleotide
  modified_base 96: mod_base = OTHER; note = 2'-O-methyl ribonucleotide
  modified_base 97: mod_base = OTHER; note = 2'-O-methyl ribonucleotide
  modified_base 98: mod_base = OTHER; note = 2'-O-methyl ribonucleotide
  modified_base 99: mod_base = OTHER; note = 2'-O-methyl ribonucleotide
  modified_base 100: mod_base = OTHER; note = 2'-O-methyl ribonucleotide
  modified_base 101: mod_base = OTHER; note = uniform ribonucleotides (A, C, G, inosine or U), deoxynucleotides (A, G, C, inosine or T), ribonebularine, 2'-O-methylnebularine or deoxynebularine
  modified_base 102: mod_base = OTHER; note = uniform ribonucleotides (A, C, G, inosine or U), deoxynucleotides (A, G, C, inosine or T), ribonebularine, 2'-O-methylnebularine or deoxynebularine
  modified_base 103: mod_base = OTHER; note = uniform ribonucleotides (A, C, G, inosine or U), deoxynucleotides (A, G, C, inosine or T), ribonebularine, 2'-O-methylnebularine or deoxynebularine
  modified_base 1..3: mod_base = OTHER; note = phosphorothioate linkage
  modified_base 45..46: mod_base = OTHER; note = phosphorothioate linkage
  modified_base 64..65: mod_base = OTHER; note = phosphorothioate linkage
  modified_base 97..100: mod_base = OTHER; note = phosphorothioate linkage
  misc_feature 1..100: note = RNA
  misc_feature 101..103: note = Optionally DNA or RNA

SEQ ID NO: 2939 - DNA, 103 bp, synthetic construct; identical to SEQ ID NO: 1797
  source 1..103: mol_type = other DNA
  modified_base 1: mod_base = OTHER; note = 2'-O-methyl ribonucleotide
  modified_base 2: mod_base = OTHER; note = 2'-O-methyl ribonucleotide
  modified_base 3: mod_base = OTHER; note = 2'-O-methyl ribonucleotide
  modified_base 21: mod_base = OTHER; note = 2'-O-methyl ribonucleotide
  modified_base 28: mod_base = OTHER; note = 2'-O-methyl ribonucleotide
  modified_base 29: mod_base = OTHER; note = 2'-O-methyl ribonucleotide
  modified_base 30: mod_base = OTHER; note = 2'-O-methyl ribonucleotide
  modified_base 31: mod_base = OTHER; note = 2'-O-methyl ribonucleotide
  modified_base 32: mod_base = OTHER; note = 2'-O-methyl ribonucleotide
  modified_base 33: mod_base = OTHER; note = 2'-O-methyl ribonucleotide
  modified_base 34: mod_base = OTHER; note = 2'-O-methyl ribonucleotide
  modified_base 35: mod_base = OTHER; note = 2'-O-methyl ribonucleotide
  modified_base 36: mod_base = OTHER; note = 2'-O-methyl ribonucleotide
  modified_base 37: mod_base = OTHER; note = 2'-O-methyl ribonucleotide
  modified_base 38: mod_base = OTHER; note = 2'-O-methyl ribonucleotide
  modified_base 39: mod_base = OTHER; note = 2'-O-methyl ribonucleotide
  modified_base 40: mod_base = OTHER; note = 2'-O-methyl ribonucleotide
  modified_base 41: mod_base = OTHER; note = 2'-O-methyl ribonucleotide
  modified_base 42: mod_base = OTHER; note = 2'-O-methyl ribonucleotide
  modified_base 46: mod_base = OTHER; note = 2'-O-methyl ribonucleotide
  modified_base 48: mod_base = OTHER; note = 2'-O-methyl ribonucleotide
  modified_base 50: mod_base = OTHER; note = 2'-O-methyl ribonucleotide
  modified_base 52: mod_base = OTHER; note = 2'-O-methyl ribonucleotide
  modified_base 53: mod_base = OTHER; note = 2'-O-methyl ribonucleotide
  modified_base 54: mod_base = OTHER; note = 2'-O-methyl ribonucleotide
  modified_base 57: mod_base = OTHER; note = 2'-O-methyl ribonucleotide
  modified_base 61: mod_base = OTHER; note = 2'-O-methyl ribonucleotide
  modified_base 66: mod_base = OTHER; note = 2'-O-methyl ribonucleotide
  modified_base 67: mod_base = OTHER; note = 2'-O-methyl ribonucleotide
  modified_base 70: mod_base = OTHER; note = 2'-O-methyl ribonucleotide
  modified_base 71: mod_base = OTHER; note = 2'-O-methyl ribonucleotide
  modified_base 72: mod_base = OTHER; note = 2'-O-methyl ribonucleotide
  modified_base 73: mod_base = OTHER; note = 2'-O-methyl ribonucleotide
  modified_base 74: mod_base = OTHER; note = 2'-O-methyl ribonucleotide
  modified_base 75: mod_base = OTHER; note = 2'-O-methyl ribonucleotide
  modified_base 76: mod_base = OTHER; note = 2'-O-methyl ribonucleotide
  modified_base 77: mod_base = OTHER; note = 2'-O-methyl ribonucleotide
  modified_base 78: mod_base = OTHER; note = 2'-O-methyl ribonucleotide
  modified_base 79: mod_base = OTHER; note = 2'-O-methyl ribonucleotide
  modified_base 80: mod_base = OTHER; note = 2'-O-methyl ribonucleotide
  modified_base 82: mod_base = OTHER; note = 2'-O-methyl ribonucleotide
  modified_base 83: mod_base = OTHER; note = 2'-O-methyl ribonucleotide
  modified_base 84: mod_base = OTHER; note = 2'-O-methyl ribonucleotide
  modified_base 85: mod_base = OTHER; note = 2'-O-methyl ribonucleotide
  modified_base 86: mod_base = OTHER; note = 2'-O-methyl ribonucleotide
  modified_base 87: mod_base = OTHER; note = 2'-O-methyl ribonucleotide
  modified_base 89: mod_base = OTHER; note = 2'-O-methyl ribonucleotide
  modified_base 92: mod_base = OTHER; note = 2'-O-methyl ribonucleotide
  modified_base 93: mod_base = OTHER; note = 2'-O-methyl ribonucleotide
  modified_base 94: mod_base = OTHER; note = 2'-O-methyl ribonucleotide
  modified_base 95: mod_base = OTHER; note = 2'-O-methyl ribonucleotide
  modified_base 96: mod_base = OTHER; note = 2'-O-methyl ribonucleotide
  modified_base 97: mod_base = OTHER; note = 2'-O-methyl ribonucleotide
  modified_base 98: mod_base = OTHER; note = 2'-O-methyl ribonucleotide
  modified_base 99: mod_base = OTHER; note = 2'-O-methyl ribonucleotide
  modified_base 100: mod_base = OTHER; note = 2'-O-methyl ribonucleotide
  modified_base 101: mod_base = OTHER; note = uniform ribonucleotides (A, C, G, inosine or U), deoxynucleotides (A, G, C, inosine or T), ribonebularine, 2'-O-methylnebularine or deoxynebularine
  modified_base 102: mod_base = OTHER; note = uniform ribonucleotides (A, C, G, inosine or U), deoxynucleotides (A, G, C, inosine or T), ribonebularine, 2'-O-methylnebularine or deoxynebularine
  modified_base 103: mod_base = OTHER; note = uniform ribonucleotides (A, C, G, inosine or U), deoxynucleotides (A, G, C, inosine or T), ribonebularine, 2'-O-methylnebularine or deoxynebularine
  modified_base 1..3: mod_base = OTHER; note = phosphorothioate linkage
  modified_base 45..46: mod_base = OTHER; note = phosphorothioate linkage
  modified_base 64..65: mod_base = OTHER; note = phosphorothioate linkage
  modified_base 97..100: mod_base = OTHER; note = phosphorothioate linkage
  misc_feature 1..100: note = RNA
  misc_feature 101..103: note = Optionally DNA or RNA

SEQ ID NO: 2940 - DNA, 103 bp, synthetic construct; identical to SEQ ID NO: 1797
  source 1..103: mol_type = other DNA
  modified_base 1: mod_base = OTHER; note = 2'-O-methyl ribonucleotide
  modified_base 2: mod_base = OTHER; note = 2'-O-methyl ribonucleotide
  modified_base 3: mod_base = OTHER; note = 2'-O-methyl ribonucleotide
  modified_base 21: mod_base = OTHER; note = 2'-O-methyl ribonucleotide
  modified_base 28: mod_base = OTHER; note = 2'-O-methyl ribonucleotide
  modified_base 29: mod_base = OTHER; note = 2'-O-methyl ribonucleotide
  modified_base 30: mod_base = OTHER; note = 2'-O-methyl ribonucleotide
  modified_base 31: mod_base = OTHER; note = 2'-O-methyl ribonucleotide
  modified_base 32: mod_base = OTHER; note = 2'-O-methyl ribonucleotide
  modified_base 33: mod_base = OTHER; note = 2'-O-methyl ribonucleotide
  modified_base 34: mod_base = OTHER; note = 2'-O-methyl ribonucleotide
  modified_base 35: mod_base = OTHER; note = 2'-O-methyl ribonucleotide
  modified_base 36: mod_base = OTHER; note = 2'-O-methyl ribonucleotide
  modified_base 37: mod_base = OTHER; note = 2'-O-methyl ribonucleotide
  modified_base 38: mod_base = OTHER; note = 2'-O-methyl ribonucleotide
  modified_base 39: mod_base = OTHER; note = 2'-O-methyl ribonucleotide
  modified_base 40: mod_base = OTHER; note = 2'-O-methyl ribonucleotide
  modified_base 41: mod_base = OTHER; note = 2'-O-methyl ribonucleotide
  modified_base 42: mod_base = OTHER; note = 2'-O-methyl ribonucleotide
  modified_base 46: mod_base = OTHER; note = 2'-O-methyl ribonucleotide
  modified_base 48: mod_base = OTHER; note = 2'-O-methyl ribonucleotide
  modified_base 50: mod_base = OTHER; note = 2'-O-methyl ribonucleotide
  modified_base 52: mod_base = OTHER; note = 2'-O-methyl ribonucleotide
  modified_base 53: mod_base = OTHER; note = 2'-O-methyl ribonucleotide
  modified_base 54: mod_base = OTHER; note = 2'-O-methyl ribonucleotide
  modified_base 57: mod_base = OTHER; note = 2'-O-methyl ribonucleotide
  modified_base 61: mod_base = OTHER; note = 2'-O-methyl ribonucleotide
  modified_base 66: mod_base = OTHER; note = 2'-O-methyl ribonucleotide
  modified_base 67: mod_base = OTHER; note = 2'-O-methyl ribonucleotide
  modified_base 70: mod_base = OTHER; note = 2'-O-methyl ribonucleotide
  modified_base 71: mod_base = OTHER; note = 2'-O-methyl ribonucleotide
  modified_base 72: mod_base = OTHER; note = 2'-O-methyl ribonucleotide
  modified_base 73: mod_base = OTHER; note = 2'-O-methyl ribonucleotide
  modified_base 74: mod_base = OTHER; note = 2'-O-methyl ribonucleotide
  modified_base 75: mod_base = OTHER; note = 2'-O-methyl ribonucleotide
  modified_base 76: mod_base = OTHER; note = 2'-O-methyl ribonucleotide
  modified_base 77: mod_base = OTHER; note = 2'-O-methyl ribonucleotide
  modified_base 78: mod_base = OTHER; note = 2'-O-methyl ribonucleotide
  modified_base 79: mod_base = OTHER; note = 2'-O-methyl ribonucleotide
  modified_base 80: mod_base = OTHER; note = 2'-O-methyl ribonucleotide
  modified_base 82: mod_base = OTHER; note = 2'-O-methyl ribonucleotide
  modified_base 83: mod_base = OTHER; note = 2'-O-methyl ribonucleotide
  modified_base 84: mod_base = OTHER; note = 2'-O-methyl ribonucleotide
  modified_base 85: mod_base = OTHER; note = 2'-O-methyl ribonucleotide
  modified_base 86: mod_base = OTHER; note = 2'-O-methyl ribonucleotide
  modified_base 87: mod_base = OTHER; note = 2'-O-methyl ribonucleotide
  modified_base 89: mod_base = OTHER; note = 2'-O-methyl ribonucleotide
  modified_base 91: mod_base = OTHER; note = 2'-O-methyl ribonucleotide
  modified_base 92: mod_base = OTHER; note = 2'-O-methyl ribonucleotide
  modified_base 93: mod_base = OTHER; note = 2'-O-methyl ribonucleotide
  modified_base 94: mod_base = OTHER; note = 2'-O-methyl ribonucleotide
  modified_base 95: mod_base = OTHER; note = 2'-O-methyl ribonucleotide
  modified_base 96: mod_base = OTHER; note = 2'-O-methyl ribonucleotide
  modified_base 97: mod_base = OTHER; note = 2'-O-methyl ribonucleotide
  modified_base 98: mod_base = OTHER; note = 2'-O-methyl ribonucleotide
  modified_base 99: mod_base = OTHER; note = 2'-O-methyl ribonucleotide
  modified_base 100: mod_base = OTHER; note = 2'-O-methyl ribonucleotide
  modified_base 101: mod_base = OTHER; note = uniform ribonucleotides (A, C, G, inosine or U), deoxynucleotides (A, G, C, inosine or T), ribonebularine, 2'-O-methylnebularine or deoxynebularine
  modified_base 102: mod_base = OTHER; note = uniform ribonucleotides (A, C, G, inosine or U), deoxynucleotides (A, G, C, inosine or T), ribonebularine, 2'-O-methylnebularine or deoxynebularine
  modified_base 103: mod_base = OTHER; note = uniform ribonucleotides (A, C, G, inosine or U), deoxynucleotides (A, G, C, inosine or T), ribonebularine, 2'-O-methylnebularine or deoxynebularine
  modified_base 1..3: mod_base = OTHER; note = phosphorothioate linkage
  modified_base 45..46: mod_base = OTHER; note = phosphorothioate linkage
  modified_base 64..65: mod_base = OTHER; note = phosphorothioate linkage
  modified_base 97..100: mod_base = OTHER; note = phosphorothioate linkage
  misc_feature 1..100: note = RNA
  misc_feature 101..103: note = Optionally DNA or RNA

SEQ ID NO: 2941 - DNA, 103 bp, synthetic construct; identical to SEQ ID NO: 1797
  source 1..103: mol_type = other DNA
  modified_base 1: mod_base = OTHER; note = 2'-O-methyl ribonucleotide
  modified_base 2: mod_base = OTHER; note = 2'-O-methyl ribonucleotide
  modified_base 3: mod_base = OTHER; note = 2'-O-methyl ribonucleotide
  modified_base 21: mod_base = OTHER; note = 2'-O-methyl ribonucleotide
  modified_base 28: mod_base = OTHER; note = 2'-O-methyl ribonucleotide
  modified_base 29: mod_base = OTHER; note = 2'-O-methyl ribonucleotide
  modified_base 30: mod_base = OTHER; note = 2'-O-methyl ribonucleotide
  modified_base 31: mod_base = OTHER; note = 2'-O-methyl ribonucleotide
  modified_base 32: mod_base = OTHER; note = 2'-O-methyl ribonucleotide
  modified_base 34: mod_base = OTHER; note = 2'-O-methyl ribonucleotide
  modified_base 35: mod_base = OTHER; note = 2'-O-methyl ribonucleotide
  modified_base 36: mod_base = OTHER; note = 2'-O-methyl ribonucleotide
  modified_base 37: mod_base = OTHER; note = 2'-O-methyl ribonucleotide
  modified_base 38: mod_base = OTHER; note = 2'-O-methyl ribonucleotide
  modified_base 39: mod_base = OTHER; note = 2'-O-methyl ribonucleotide
  modified_base 40: mod_base = OTHER; note = 2'-O-methyl ribonucleotide
  modified_base 41: mod_base = OTHER; note = 2'-O-methyl ribonucleotide
  modified_base 42: mod_base = OTHER; note = 2'-O-methyl ribonucleotide
  modified_base 46: mod_base = OTHER; note = 2'-O-methyl ribonucleotide
  modified_base 48: mod_base = OTHER; note = 2'-O-methyl ribonucleotide
  modified_base 50: mod_base = OTHER; note = 2'-O-methyl ribonucleotide
  modified_base 52: mod_base = OTHER; note = 2'-O-methyl ribonucleotide
  modified_base 53: mod_base = OTHER; note = 2'-O-methyl ribonucleotide
  modified_base 54: mod_base = OTHER; note = 2'-O-methyl ribonucleotide
  modified_base 57: mod_base = OTHER; note = 2'-O-methyl ribonucleotide
  modified_base 61: mod_base = OTHER; note = 2'-O-methyl ribonucleotide
  modified_base 66: mod_base = OTHER; note = 2'-O-methyl ribonucleotide
  modified_base 67: mod_base = OTHER; note = 2'-O-methyl ribonucleotide
  modified_base 70: mod_base = OTHER; note = 2'-O-methyl ribonucleotide
  modified_base 71: mod_base = OTHER; note = 2'-O-methyl ribonucleotide
  modified_base 72: mod_base = OTHER; note = 2'-O-methyl ribonucleotide
  modified_base 73: mod_base = OTHER; note = 2'-O-methyl ribonucleotide
  modified_base 74: mod_base = OTHER; note = 2'-O-methyl ribonucleotide
  modified_base 75: mod_base = OTHER; note = 2'-O-methyl ribonucleotide
  modified_base 76: mod_base = OTHER; note = 2'-O-methyl ribonucleotide
  modified_base 77: mod_base = OTHER; note = 2'-O-methyl ribonucleotide
  modified_base 78: mod_base = OTHER; note = 2'-O-methyl ribonucleotide
  modified_base 79: mod_base = OTHER; note = 2'-O-methyl ribonucleotide
  modified_base 80: mod_base = OTHER; note = 2'-O-methyl ribonucleotide
  modified_base 82: mod_base = OTHER; note = 2'-O-methyl ribonucleotide
  modified_base 83: mod_base = OTHER; note = 2'-O-methyl ribonucleotide
  modified_base 84: mod_base = OTHER; note = 2'-O-methyl ribonucleotide
  modified_base 85: mod_base = OTHER; note = 2'-O-methyl ribonucleotide
  modified_base 86: mod_base = OTHER; note = 2'-O-methyl ribonucleotide
  modified_base 87: mod_base = OTHER; note = 2'-O-methyl ribonucleotide
  modified_base 89: mod_base = OTHER; note = 2'-O-methyl ribonucleotide
  modified_base 92: mod_base = OTHER; note = 2'-O-methyl ribonucleotide
  modified_base 93: mod_base = OTHER; note = 2'-O-methyl ribonucleotide
  modified_base 94: mod_base = OTHER; note = 2'-O-methyl ribonucleotide
  modified_base 95: mod_base = OTHER; note = 2'-O-methyl ribonucleotide
  modified_base 96: mod_base = OTHER; note = 2'-O-methyl ribonucleotide
  modified_base 97: mod_base = OTHER; note = 2'-O-methyl ribonucleotide
  modified_base 98: mod_base = OTHER; note = 2'-O-methyl ribonucleotide
  modified_base 99: mod_base = OTHER; note = 2'-O-methyl ribonucleotide
  modified_base 100: mod_base = OTHER; note = 2'-O-methyl ribonucleotide
  modified_base 101: mod_base = OTHER; note = uniform ribonucleotides (A, C, G, inosine or U), deoxynucleotides (A, G, C, inosine or T), ribonebularine, 2'-O-methylnebularine or deoxynebularine
  modified_base 102: mod_base = OTHER; note = uniform ribonucleotides (A, C, G, inosine or U), deoxynucleotides (A, G, C, inosine or T), ribonebularine, 2'-O-methylnebularine or deoxynebularine
  modified_base 103: mod_base = OTHER; note = uniform ribonucleotides (A, C, G, inosine or U), deoxynucleotides (A, G, C, inosine or T), ribonebularine, 2'-O-methylnebularine or deoxynebularine
  modified_base 1..3: mod_base = OTHER; note = phosphorothioate linkage
  modified_base 45..46: mod_base = OTHER; note = phosphorothioate linkage
  modified_base 64..65: mod_base = OTHER; note = phosphorothioate linkage
  modified_base 97..100: mod_base = OTHER; note = phosphorothioate linkage
  misc_feature 1..100: note = RNA
  misc_feature 101..103: note = Optionally DNA or RNA

SEQ ID NO: 2942 - DNA, 103 bp, synthetic construct; identical to SEQ ID NO: 1797
  source 1..103: mol_type = other DNA
  modified_base 1: mod_base = OTHER; note = 2'-O-methyl ribonucleotide
  modified_base 2: mod_base = OTHER; note = 2'-O-methyl ribonucleotide
  modified_base 3: mod_base = OTHER; note = 2'-O-methyl ribonucleotide
  modified_base 21: mod_base = OTHER; note = 2'-O-methyl ribonucleotide
  modified_base 28: mod_base = OTHER; note = 2'-O-methyl ribonucleotide
  modified_base 29: mod_base = OTHER; note = 2'-O-methyl ribonucleotide
  modified_base 30: mod_base = OTHER; note = 2'-O-methyl ribonucleotide
  modified_base 31: mod_base = OTHER; note = 2'-O-methyl ribonucleotide
  modified_base 32: mod_base = OTHER; note = 2'-O-methyl ribonucleotide
  modified_base 34: mod_base = OTHER; note = 2'-O-methyl ribonucleotide
  modified_base 35: mod_base = OTHER; note = 2'-O-methyl ribonucleotide
  modified_base 36: mod_base = OTHER; note = 2'-O-methyl ribonucleotide
  modified_base 37: mod_base = OTHER; note = 2'-O-methyl ribonucleotide
  modified_base 38: mod_base = OTHER; note = 2'-O-methyl ribonucleotide
  modified_base 39: mod_base = OTHER; note = 2'-O-methyl ribonucleotide
  modified_base 40: mod_base = OTHER; note = 2'-O-methyl ribonucleotide
  modified_base 41: mod_base = OTHER; note = 2'-O-methyl ribonucleotide
  modified_base 42: mod_base = OTHER; note = 2'-O-methyl ribonucleotide
  modified_base 46: mod_base = OTHER; note = 2'-O-methyl ribonucleotide
  modified_base 48: mod_base = OTHER; note = 2'-O-methyl ribonucleotide
  modified_base 50: mod_base = OTHER; note = 2'-O-methyl ribonucleotide
  modified_base 52: mod_base = OTHER; note = 2'-O-methyl ribonucleotide
  modified_base 53: mod_base = OTHER; note = 2'-O-methyl ribonucleotide
  modified_base 54: mod_base = OTHER; note = 2'-O-methyl ribonucleotide
  modified_base 57: mod_base = OTHER; note = 2'-O-methyl ribonucleotide
  modified_base 61: mod_base = OTHER; note = 2'-O-methyl ribonucleotide
  modified_base 66: mod_base = OTHER; note = 2'-O-methyl ribonucleotide
  modified_base 67: mod_base = OTHER; note = 2'-O-methyl ribonucleotide
  modified_base 70: mod_base = OTHER; note = 2'-O-methyl ribonucleotide
  modified_base 71: mod_base = OTHER; note = 2'-O-methyl ribonucleotide
  modified_base 72: mod_base = OTHER; note = 2'-O-methyl ribonucleotide
  modified_base 73: mod_base = OTHER; note = 2'-O-methyl ribonucleotide
  modified_base 74: mod_base = OTHER; note = 2'-O-methyl ribonucleotide
  modified_base 75: mod_base = OTHER; note = 2'-O-methyl ribonucleotide
  modified_base 76: mod_base = OTHER; note = 2'-O-methyl ribonucleotide
  modified_base 77: mod_base = OTHER; note = 2'-O-methyl ribonucleotide
  modified_base 78: mod_base = OTHER; note = 2'-O-methyl ribonucleotide
  modified_base 79: mod_base = OTHER; note = 2'-O-methyl ribonucleotide
  modified_base 80: mod_base = OTHER; note = 2'-O-methyl ribonucleotide
  modified_base 82: mod_base = OTHER; note = 2'-O-methyl ribonucleotide
  modified_base 83: mod_base = OTHER; note = 2'-O-methyl ribonucleotide
  modified_base 84: mod_base = OTHER; note = 2'-O-methyl ribonucleotide
  modified_base 85: mod_base = OTHER; note = 2'-O-methyl ribonucleotide
  modified_base 86: mod_base = OTHER; note = 2'-O-methyl ribonucleotide
  modified_base 87: mod_base = OTHER; note = 2'-O-methyl ribonucleotide
  modified_base 89: mod_base = OTHER; note = 2'-O-methyl ribonucleotide
  modified_base 91: mod_base = OTHER; note = 2'-O-methyl ribonucleotide
  modified_base 92: mod_base = OTHER; note = 2'-O-methyl ribonucleotide
  modified_base 93: mod_base = OTHER; note = 2'-O-methyl ribonucleotide
  modified_base 94: mod_base = OTHER; note = 2'-O-methyl ribonucleotide
  modified_base 95: mod_base = OTHER; note = 2'-O-methyl ribonucleotide
  modified_base 96: mod_base = OTHER; note = 2'-O-methyl ribonucleotide
  modified_base 97: mod_base = OTHER; note = 2'-O-methyl ribonucleotide
  modified_base 98: mod_base = OTHER; note = 2'-O-methyl ribonucleotide
  modified_base 99: mod_base = OTHER; note = 2'-O-methyl ribonucleotide
  modified_base 100: mod_base = OTHER; note = 2'-O-methyl ribonucleotide
  modified_base 101: mod_base = OTHER; note = uniform ribonucleotides (A, C, G, inosine or U), deoxynucleotides (A, G, C, inosine or T), ribonebularine, 2'-O-methylnebularine or deoxynebularine
  modified_base 102: mod_base = OTHER; note = uniform ribonucleotides (A, C, G, inosine or U), deoxynucleotides (A, G, C, inosine or T), ribonebularine, 2'-O-methylnebularine or deoxynebularine
  modified_base 103: mod_base = OTHER; note = uniform ribonucleotides (A, C, G, inosine or U), deoxynucleotides (A, G, C, inosine or T), ribonebularine, 2'-O-methylnebularine or deoxynebularine
  modified_base 1..3: mod_base = OTHER; note = phosphorothioate linkage
  modified_base 45..46: mod_base = OTHER; note = phosphorothioate linkage
  modified_base 64..65: mod_base = OTHER; note = phosphorothioate linkage
  modified_base 97..100: mod_base = OTHER; note = phosphorothioate linkage
  misc_feature 1..100: note = RNA
  misc_feature 101..103: note = Optionally DNA or RNA

SEQ ID NO: 2943 - DNA, 103 bp, synthetic construct; identical to SEQ ID NO: 1797
  source 1..103: mol_type = other DNA
  modified_base 1: mod_base = OTHER; note = 2'-O-methyl ribonucleotide
  modified_base 2: mod_base = OTHER; note = 2'-O-methyl ribonucleotide
  modified_base 3: mod_base = OTHER; note = 2'-O-methyl ribonucleotide
  modified_base 21: mod_base = OTHER; note = 2'-O-methyl ribonucleotide
  modified_base 28: mod_base = OTHER; note = 2'-O-methyl ribonucleotide
  modified_base 29: mod_base = OTHER; note = 2'-O-methyl ribonucleotide
  modified_base 30: mod_base = OTHER; note = 2'-O-methyl ribonucleotide
  modified_base 31: mod_base = OTHER; note = 2'-O-methyl ribonucleotide
  modified_base 32: mod_base = OTHER; note = 2'-O-methyl ribonucleotide
  modified_base 34: mod_base = OTHER; note = 2'-O-methyl ribonucleotide
  modified_base 35: mod_base = OTHER; note = 2'-O-methyl ribonucleotide
  modified_base 36: mod_base = OTHER; note = 2'-O-methyl ribonucleotide
  modified_base 37: mod_base = OTHER; note = 2'-O-methyl ribonucleotide
  modified_base 38: mod_base = OTHER; note = 2'-O-methyl ribonucleotide
  modified_base 39: mod_base = OTHER; note = 2'-O-methyl ribonucleotide
  modified_base 40: mod_base = OTHER; note = 2'-O-methyl ribonucleotide
  modified_base 41: mod_base = OTHER; note = 2'-O-methyl ribonucleotide
  modified_base 42: mod_base = OTHER; note = 2'-O-methyl ribonucleotide
  modified_base 46: mod_base = OTHER; note = 2'-O-methyl ribonucleotide
  modified_base 48: mod_base = OTHER; note = 2'-O-methyl ribonucleotide
  modified_base 50: mod_base = OTHER; note = 2'-O-methyl ribonucleotide
  modified_base 52: mod_base = OTHER; note = 2'-O-methyl ribonucleotide
  modified_base 53: mod_base = OTHER; note = 2'-O-methyl ribonucleotide
  modified_base 54: mod_base = OTHER; note = 2'-O-methyl ribonucleotide
  modified_base 55: mod_base = OTHER; note = 2'-O-methyl ribonucleotide
  modified_base 56: mod_base = OTHER; note = 2'-O-methyl ribonucleotide
  modified_base 57: mod_base = OTHER; note = 2'-O-methyl ribonucleotide
  modified_base 60: mod_base = OTHER; note = 2'-O-methyl ribonucleotide
  modified_base 61: mod_base = OTHER; note = 2'-O-methyl ribonucleotide
  modified_base 66: mod_base = OTHER; note = 2'-O-methyl ribonucleotide
  modified_base 67: mod_base = OTHER; note = 2'-O-methyl ribonucleotide
  modified_base 70: mod_base = OTHER; note = 2'-O-methyl ribonucleotide
  modified_base 71: mod_base = OTHER; note = 2'-O-methyl ribonucleotide
  modified_base 72: mod_base = OTHER; note = 2'-O-methyl ribonucleotide
  modified_base 74: mod_base = OTHER; note = 2'-O-methyl ribonucleotide
  modified_base 75: mod_base = OTHER; note = 2'-O-methyl ribonucleotide
  modified_base 76: mod_base = OTHER; note = 2'-O-methyl ribonucleotide
  modified_base 77: mod_base = OTHER; note = 2'-O-methyl ribonucleotide
  modified_base 78: mod_base = OTHER; note = 2'-O-methyl ribonucleotide
  modified_base 79: mod_base = OTHER; note = 2'-O-methyl ribonucleotide
  modified_base 80: mod_base = OTHER; note = 2'-O-methyl ribonucleotide
  modified_base 82: mod_base = OTHER; note = 2'-O-methyl ribonucleotide
  modified_base 83: mod_base = OTHER; note = 2'-O-methyl ribonucleotide
  modified_base 84: mod_base = OTHER; note = 2'-O-methyl ribonucleotide
  modified_base 85: mod_base = OTHER; note = 2'-O-methyl ribonucleotide
  modified_base 86: mod_base = OTHER; note = 2'-O-methyl ribonucleotide
  modified_base 87: mod_base = OTHER; note = 2'-O-methyl ribonucleotide
  modified_base 89: mod_base = OTHER; note = 2'-O-methyl ribonucleotide
  modified_base 92: mod_base = OTHER; note = 2'-O-methyl ribonucleotide
  modified_base 93: mod_base = OTHER; note = 2'-O-methyl ribonucleotide
  modified_base 94: mod_base = OTHER; note = 2'-O-methyl ribonucleotide
  modified_base 95: mod_base = OTHER; note = 2'-O-methyl ribonucleotide
  modified_base 96: mod_base = OTHER; note = 2'-O-methyl ribonucleotide
  modified_base 97: mod_base = OTHER; note = 2'-O-methyl ribonucleotide
  modified_base 98: mod_base = OTHER; note = 2'-O-methyl ribonucleotide
  modified_base 99: mod_base = OTHER; note = 2'-O-methyl ribonucleotide
  modified_base 100: mod_base = OTHER; note = 2'-O-methyl ribonucleotide
  modified_base 101: mod_base = OTHER; note = uniform ribonucleotides (A, C, G, inosine or U), deoxynucleotides (A, G, C, inosine or T), ribonebularine, 2'-O-methylnebularine or deoxynebularine
  modified_base 102: mod_base = OTHER; note = uniform ribonucleotides (A, C, G, inosine or U), deoxynucleotides (A, G, C, inosine or T), ribonebularine, 2'-O-methylnebularine or deoxynebularine
  modified_base 103: mod_base = OTHER; note = uniform ribonucleotides (A, C, G, inosine or U), deoxynucleotides (A, G, C, inosine or T), ribonebularine, 2'-O-methylnebularine or deoxynebularine
  modified_base 1..3: mod_base = OTHER; note = phosphorothioate linkage
  modified_base 45..46: mod_base = OTHER; note = phosphorothioate linkage
  modified_base 64..65: mod_base = OTHER; note = phosphorothioate linkage
  modified_base 97..100: mod_base = OTHER; note = phosphorothioate linkage
  misc_feature 1..100: note = RNA
  misc_feature 101..103: note = Optionally DNA or RNA

SEQ ID NO: 2944 - DNA, 103 bp, synthetic construct; identical to SEQ ID NO: 1795
  source 1..103: mol_type = other DNA
  modified_base 1: mod_base = OTHER; note = 2'-O-methyl ribonucleotide
  modified_base 2: mod_base = OTHER; note = 2'-O-methyl ribonucleotide
  modified_base 3: mod_base = OTHER; note = 2'-O-methyl ribonucleotide
  modified_base 21: mod_base = OTHER; note = 2'-O-methyl ribonucleotide
  modified_base 28: mod_base = OTHER; note = 2'-O-methyl ribonucleotide
  modified_base 29: mod_base = OTHER; note = 2'-O-methyl ribonucleotide
  modified_base 30: mod_base = OTHER; note = 2'-O-methyl ribonucleotide
  modified_base 31: mod_base = OTHER; note = 2'-O-methyl ribonucleotide
  modified_base 32: mod_base = OTHER; note = 2'-O-methyl ribonucleotide
  modified_base 33: mod_base = OTHER; note = 2'-O-methyl ribonucleotide
  modified_base 34: mod_base = OTHER; note = 2'-O-methyl ribonucleotide
  modified_base 35: mod_base = OTHER; note = 2'-O-methyl ribonucleotide
  modified_base 36: mod_base = OTHER; note = 2'-O-methyl ribonucleotide
  modified_base 37: mod_base = OTHER; note = 2'-O-methyl ribonucleotide
  modified_base 38: mod_base = OTHER; note = 2'-O-methyl ribonucleotide
  modified_base 39: mod_base = OTHER; note = 2'-O-methyl ribonucleotide
  modified_base 40: mod_base = OTHER; note = 2'-O-methyl ribonucleotide
  modified_base 41: mod_base = OTHER; note = 2'-O-methyl ribonucleotide
  modified_base 42: mod_base = OTHER; note = 2'-O-methyl ribonucleotide
  modified_base 46: mod_base = OTHER; note = 2'-O-methyl ribonucleotide
  modified_base 48: mod_base = OTHER; note = 2'-O-methyl ribonucleotide
  modified_base 50: mod_base = OTHER; note = 2'-O-methyl ribonucleotide
  modified_base 52: mod_base = OTHER; note = 2'-O-methyl ribonucleotide
  modified_base 53: mod_base = OTHER; note = 2'-O-methyl ribonucleotide
  modified_base 54: mod_base = OTHER; note = 2'-O-methyl ribonucleotide
  modified_base 55: mod_base = OTHER; note = 2'-O-methyl ribonucleotide
  modified_base 56: mod_base = OTHER; note = 2'-O-methyl ribonucleotide
  modified_base 57: mod_base = OTHER; note = 2'-O-methyl ribonucleotide
  modified_base 60: mod_base = OTHER; note = 2'-O-methyl ribonucleotide
  modified_base 61: mod_base = OTHER; note = 2'-O-methyl ribonucleotide
  modified_base 66: mod_base = OTHER; note = 2'-O-methyl ribonucleotide
  modified_base 67: mod_base = OTHER; note = 2'-O-methyl ribonucleotide
  modified_base 70: mod_base = OTHER; note = 2'-O-methyl ribonucleotide
  modified_base 71: mod_base = OTHER; note = 2'-O-methyl ribonucleotide
  modified_base 72: mod_base = OTHER; note = 2'-O-methyl ribonucleotide
  modified_base 73: mod_base = OTHER; note = 2'-O-methyl ribonucleotide
  modified_base 74: mod_base = OTHER; note = 2'-O-methyl ribonucleotide
  modified_base 75: mod_base = OTHER; note = 2'-O-methyl ribonucleotide
  modified_base 76: mod_base = OTHER; note = 2'-O-methyl ribonucleotide
  modified_base 77: mod_base = OTHER; note = 2'-O-methyl ribonucleotide
  modified_base 78: mod_base = OTHER; note = 2'-O-methyl ribonucleotide
  modified_base 79: mod_base = OTHER; note = 2'-O-methyl ribonucleotide
  modified_base 80: mod_base = OTHER; note = 2'-O-methyl ribonucleotide
  modified_base 81: mod_base = OTHER; note = 2'-O-methyl ribonucleotide
  modified_base 83: mod_base = OTHER; note = 2'-O-methyl ribonucleotide
  modified_base 84: mod_base = OTHER; note = 2'-O-methyl ribonucleotide
  modified_base 85: mod_base = OTHER; note = 2'-O-methyl ribonucleotide
  modified_base 86: mod_base = OTHER; note = 2'-O-methyl ribonucleotide
  modified_base 87: mod_base = OTHER; note = 2'-O-methyl ribonucleotide
  modified_base 88: mod_base = OTHER; note = 2'-O-methyl ribonucleotide
  modified_base 89: mod_base = OTHER; note = 2'-O-methyl ribonucleotide
  modified_base 90: mod_base = OTHER; note = 2'-O-methyl ribonucleotide
  modified_base 91: mod_base = OTHER; note = 2'-O-methyl ribonucleotide
  modified_base 92: mod_base = OTHER; note = 2'-O-methyl ribonucleotide
  modified_base 93: mod_base = OTHER; note = 2'-O-methyl ribonucleotide
  modified_base 94: mod_base = OTHER; note = 2'-O-methyl ribonucleotide
  modified_base 95: mod_base = OTHER; note = 2'-O-methyl ribonucleotide
  modified_base 96: mod_base = OTHER; note = 2'-O-methyl ribonucleotide
  modified_base 97: mod_base = OTHER; note = 2'-O-methyl ribonucleotide
  modified_base 98: mod_base = OTHER; note = 2'-O-methyl ribonucleotide
  modified_base 99: mod_base = OTHER; note = 2'-O-methyl ribonucleotide
  modified_base 100: mod_base = OTHER; note = 2'-O-methyl ribonucleotide
  modified_base 101: mod_base = OTHER; note = uniform ribonucleotides (A, C, G, inosine or U), deoxynucleotides (A, G, C, inosine or T), ribonebularine, 2'-O-methylnebularine or deoxynebularine
  modified_base 102: mod_base = OTHER; note = uniform ribonucleotides (A, C, G, inosine or U), deoxynucleotides (A, G, C, inosine or T), ribonebularine, 2'-O-methylnebularine or deoxynebularine
  modified_base 103: mod_base = OTHER; note = uniform ribonucleotides (A, C, G, inosine or U), deoxynucleotides (A, G, C, inosine or T), ribonebularine, 2'-O-methylnebularine or deoxynebularine
  modified_base 1..3: mod_base = OTHER; note = phosphorothioate linkage
  modified_base 25..26: mod_base = OTHER; note = phosphorothioate linkage
  modified_base 45..46: mod_base = OTHER; note = phosphorothioate linkage
  modified_base 97..100: mod_base = OTHER; note = phosphorothioate linkage
  misc_feature 1..100: note = RNA
  misc_feature 101..103: note = Optionally DNA or RNA

SEQ ID NO: 2945 - DNA, 103 bp, synthetic construct; identical to SEQ ID NO: 1795
  source 1..103: mol_type = other DNA
  modified_base 1: mod_base = OTHER; note = 2'-O-methyl ribonucleotide
  modified_base 2: mod_base = OTHER; note = 2'-O-methyl ribonucleotide
  modified_base 3: mod_base = OTHER; note = 2'-O-methyl ribonucleotide
  modified_base 21: mod_base = OTHER; note = 2'-O-methyl ribonucleotide
  modified_base 28: mod_base = OTHER; note = 2'-O-methyl ribonucleotide
  modified_base 29: mod_base = OTHER; note = 2'-O-methyl ribonucleotide
  modified_base 30: mod_base = OTHER; note = 2'-O-methyl ribonucleotide
  modified_base 31: mod_base = OTHER; note = 2'-O-methyl ribonucleotide
  modified_base 32: mod_base = OTHER; note = 2'-O-methyl ribonucleotide
  modified_base 34: mod_base = OTHER; note = 2'-O-methyl ribonucleotide
  modified_base 35: mod_base = OTHER; note = 2'-O-methyl ribonucleotide
  modified_base 36: mod_base = OTHER; note = 2'-O-methyl ribonucleotide
  modified_base 37: mod_base = OTHER; note = 2'-O-methyl ribonucleotide
  modified_base 38: mod_base = OTHER; note = 2'-O-methyl ribonucleotide
  modified_base 39: mod_base = OTHER; note = 2'-O-methyl ribonucleotide
  modified_base 40: mod_base = OTHER; note = 2'-O-methyl ribonucleotide
  modified_base 41: mod_base = OTHER; note = 2'-O-methyl ribonucleotide
  modified_base 42: mod_base = OTHER; note = 2'-O-methyl ribonucleotide
  modified_base 46: mod_base = OTHER; note = 2'-O-methyl ribonucleotide
  modified_base 48: mod_base = OTHER; note = 2'-O-methyl ribonucleotide
  modified_base 50: mod_base = OTHER; note = 2'-O-methyl ribonucleotide
  modified_base 52: mod_base = OTHER; note = 2'-O-methyl ribonucleotide
  modified_base 53: mod_base = OTHER; note = 2'-O-methyl ribonucleotide
  modified_base 54: mod_base = OTHER; note = 2'-O-methyl ribonucleotide
  modified_base 55: mod_base = OTHER; note = 2'-O-methyl ribonucleotide
  modified_base 56: mod_base = OTHER; note = 2'-O-methyl ribonucleotide
  modified_base 57: mod_base = OTHER; note = 2'-O-methyl ribonucleotide
  modified_base 60: mod_base = OTHER; note = 2'-O-methyl ribonucleotide
  modified_base 61: mod_base = OTHER; note = 2'-O-methyl ribonucleotide
  modified_base 66: mod_base = OTHER; note = 2'-O-methyl ribonucleotide
  modified_base 67: mod_base = OTHER; note = 2'-O-methyl ribonucleotide
  modified_base 70: mod_base = OTHER; note = 2'-O-methyl ribonucleotide
  modified_base 71: mod_base = OTHER; note = 2'-O-methyl ribonucleotide
  modified_base 72: mod_base = OTHER; note = 2'-O-methyl ribonucleotide
  modified_base 74: mod_base = OTHER; note = 2'-O-methyl ribonucleotide
  modified_base 75: mod_base = OTHER; note = 2'-O-methyl ribonucleotide
  modified_base 76: mod_base = OTHER; note = 2'-O-methyl ribonucleotide
  modified_base 77: mod_base = OTHER; note = 2'-O-methyl ribonucleotide
  modified_base 78: mod_base = OTHER; note = 2'-O-methyl ribonucleotide
  modified_base 79: mod_base = OTHER; note = 2'-O-methyl ribonucleotide
  modified_base 80: mod_base = OTHER; note = 2'-O-methyl ribonucleotide
  modified_base 81: mod_base = OTHER; note = 2'-O-methyl ribonucleotide
  modified_base 83: mod_base = OTHER; note = 2'-O-methyl ribonucleotide
  modified_base 84: mod_base = OTHER; note = 2'-O-methyl ribonucleotide
  modified_base 85: mod_base = OTHER; note = 2'-O-methyl ribonucleotide
  modified_base 86: mod_base = OTHER; note = 2'-O-methyl ribonucleotide
  modified_base 87: mod_base = OTHER; note = 2'-O-methyl ribonucleotide
  modified_base 88: mod_base = OTHER; note = 2'-O-methyl ribonucleotide
  modified_base 89: mod_base = OTHER; note = 2'-O-methyl ribonucleotide
  modified_base 90: mod_base = OTHER; note = 2'-O-methyl ribonucleotide
  modified_base 91: mod_base = OTHER; note = 2'-O-methyl ribonucleotide
  modified_base 92: mod_base = OTHER; note = 2'-O-methyl ribonucleotide
  modified_base 93: mod_base = OTHER; note = 2'-O-methyl ribonucleotide
  modified_base 94: mod_base = OTHER; note = 2'-O-methyl ribonucleotide
  modified_base 95: mod_base = OTHER; note = 2'-O-methyl ribonucleotide
  modified_base 96: mod_base = OTHER; note = 2'-O-methyl ribonucleotide
  modified_base 97: mod_base = OTHER; note = 2'-O-methyl ribonucleotide
  modified_base 98: mod_base = OTHER; note = 2'-O-methyl ribonucleotide
  modified_base 99: mod_base = OTHER; note = 2'-O-methyl ribonucleotide
  modified_base 100: mod_base = OTHER; note = 2'-O-methyl ribonucleotide
  modified_base 101: mod_base = OTHER; note = uniform ribonucleotides (A, C, G, inosine or U), deoxynucleotides (A, G, C, inosine or T), ribonebularine, 2'-O-methylnebularine or deoxynebularine
  modified_base 102: mod_base = OTHER; note = uniform ribonucleotides (A, C, G, inosine or U), deoxynucleotides (A, G, C, inosine or T), ribonebularine, 2'-O-methylnebularine or deoxynebularine
  modified_base 103: mod_base = OTHER; note = uniform ribonucleotides (A, C, G, inosine or U), deoxynucleotides (A, G, C, inosine or T), ribonebularine, 2'-O-methylnebularine or deoxynebularine
  modified_base 1..3: mod_base = OTHER; note = phosphorothioate linkage
  modified_base 25..26: mod_base = OTHER; note = phosphorothioate linkage
  modified_base 45..46: mod_base = OTHER; note = phosphorothioate linkage
  modified_base 97..100: mod_base = OTHER; note = phosphorothioate linkage
  misc_feature 1..100: note = RNA
  misc_feature 101..103: note = Optionally DNA or RNA

SEQ ID NO: 2946 - DNA, 103 bp, synthetic construct; identical to SEQ ID NO: 1796
  source 1..103: mol_type = other DNA
  modified_base 1: mod_base = OTHER; note = 2'-O-methyl ribonucleotide
  modified_base 2: mod_base = OTHER; note = 2'-O-methyl ribonucleotide
  modified_base 3: mod_base = OTHER; note = 2'-O-methyl ribonucleotide
  modified_base 21: mod_base = OTHER; note = 2'-O-methyl ribonucleotide
  modified_base 28: mod_base = OTHER; note = 2'-O-methyl ribonucleotide
  modified_base 29: mod_base = OTHER; note = 2'-O-methyl ribonucleotide
  modified_base 30: mod_base = OTHER; note = 2'-O-methyl ribonucleotide
  modified_base 31: mod_base = OTHER; note = 2'-O-methyl ribonucleotide
  modified_base 32: mod_base = OTHER; note = 2'-O-methyl ribonucleotide
  modified_base 33: mod_base = OTHER; note = 2'-O-methyl ribonucleotide
  modified_base 34: mod_base = OTHER; note = 2'-O-methyl ribonucleotide
  modified_base 35: mod_base = OTHER; note = 2'-O-methyl ribonucleotide
  modified_base 36: mod_base = OTHER; note = 2'-O-methyl ribonucleotide
  modified_base 37: mod_base = OTHER; note = 2'-O-methyl ribonucleotide
  modified_base 38: mod_base = OTHER; note = 2'-O-methyl ribonucleotide
  modified_base 39: mod_base = OTHER; note = 2'-O-methyl ribonucleotide
  modified_base 40: mod_base = OTHER; note = 2'-O-methyl ribonucleotide
  modified_base 41: mod_base = OTHER; note = 2'-O-methyl ribonucleotide
  modified_base 42: mod_base = OTHER; note = 2'-O-methyl ribonucleotide
  modified_base 46: mod_base = OTHER; note = 2'-O-methyl ribonucleotide
  modified_base 48: mod_base = OTHER; note = 2'-O-methyl ribonucleotide
  modified_base 50: mod_base = OTHER; note = 2'-O-methyl ribonucleotide
  modified_base 52: mod_base = OTHER; note = 2'-O-methyl ribonucleotide
  modified_base 53: mod_base = OTHER; note = 2'-O-methyl ribonucleotide
  modified_base 54: mod_base = OTHER; note = 2'-O-methyl ribonucleotide
  modified_base 55: mod_base = OTHER; note = 2'-O-methyl ribonucleotide
  modified_base 56: mod_base = OTHER; note = 2'-O-methyl ribonucleotide
  modified_base 57: mod_base = OTHER; note = 2'-O-methyl ribonucleotide
  modified_base 60: mod_base = OTHER; note = 2'-O-methyl ribonucleotide
  modified_base 61: mod_base = OTHER; note = 2'-O-methyl ribonucleotide
  modified_base 66: mod_base = OTHER; note = 2'-O-methyl ribonucleotide
  modified_base 67: mod_base = OTHER; note = 2'-O-methyl ribonucleotide
  modified_base 70: mod_base = OTHER; note = 2'-O-methyl ribonucleotide
  modified_base 71: mod_base = OTHER; note = 2'-O-methyl ribonucleotide
  modified_base 72: mod_base = OTHER; note = 2'-O-methyl ribonucleotide
  modified_base 73: mod_base = OTHER; note = 2'-O-methyl ribonucleotide
  modified_base 74: mod_base = OTHER; note = 2'-O-methyl ribonucleotide
  modified_base 75: mod_base = OTHER; note = 2'-O-methyl ribonucleotide
  modified_base 76: mod_base = OTHER; note = 2'-O-methyl ribonucleotide
  modified_base 77: mod_base = OTHER; note = 2'-O-methyl ribonucleotide
  modified_base 78: mod_base = OTHER; note = 2'-O-methyl ribonucleotide
  modified_base 79: mod_base = OTHER; note = 2'-O-methyl ribonucleotide
  modified_base 80: mod_base = OTHER; note = 2'-O-methyl ribonucleotide
  modified_base 81: mod_base = OTHER; note = 2'-O-methyl ribonucleotide
  modified_base 83: mod_base = OTHER; note = 2'-O-methyl ribonucleotide
  modified_base 84: mod_base = OTHER; note = 2'-O-methyl ribonucleotide
  modified_base 85: mod_base = OTHER; note = 2'-O-methyl ribonucleotide
  modified_base 86: mod_base = OTHER; note = 2'-O-methyl ribonucleotide
  modified_base 87: mod_base = OTHER; note = 2'-O-methyl ribonucleotide
  modified_base 88: mod_base = OTHER; note = 2'-O-methyl ribonucleotide
  modified_base 89: mod_base = OTHER; note = 2'-O-methyl ribonucleotide
  modified_base 90: mod_base = OTHER; note = 2'-O-methyl ribonucleotide
  modified_base 91: mod_base = OTHER; note = 2'-O-methyl ribonucleotide
  modified_base 92: mod_base = OTHER; note = 2'-O-methyl ribonucleotide
  modified_base 93: mod_base = OTHER; note = 2'-O-methyl ribonucleotide
  modified_base 94: mod_base = OTHER; note = 2'-O-methyl ribonucleotide
  modified_base 95: mod_base = OTHER; note = 2'-O-methyl ribonucleotide
  modified_base 96: mod_base = OTHER; note = 2'-O-methyl ribonucleotide
  modified_base 97: mod_base = OTHER; note = 2'-O-methyl ribonucleotide
  modified_base 98: mod_base = OTHER; note = 2'-O-methyl ribonucleotide
  modified_base 99: mod_base = OTHER; note = 2'-O-methyl ribonucleotide
  modified_base 100: mod_base = OTHER; note = 2'-O-methyl ribonucleotide
  modified_base 101: mod_base = OTHER; note = uniform ribonucleotides (A, C, G, inosine or U), deoxynucleotides (A, G, C, inosine or T), ribonebularine, 2'-O-methylnebularine or deoxynebularine
  modified_base 102: mod_base = OTHER; note = uniform ribonucleotides (A, C, G, inosine or U), deoxynucleotides (A, G, C, inosine or T), ribonebularine, 2'-O-methylnebularine or deoxynebularine
  modified_base 103: mod_base = OTHER; note = uniform ribonucleotides (A, C, G, inosine or U), deoxynucleotides (A, G, C, inosine or T), ribonebularine, 2'-O-methylnebularine or deoxynebularine
  modified_base 1..3: mod_base = OTHER; note = phosphorothioate linkage
  modified_base 25..26: mod_base = OTHER; note = phosphorothioate linkage
  modified_base 45..46: mod_base = OTHER; note = phosphorothioate linkage
  modified_base 97..100: mod_base = OTHER; note = phosphorothioate linkage
  misc_feature 1..100: note = RNA
  misc_feature 101..103: note = Optionally DNA or RNA

SEQ ID NO: 2947 - DNA, 103 bp, synthetic construct; identical to SEQ ID NO: 1796
  source 1..103: mol_type = other DNA
  modified_base 1: mod_base = OTHER; note = 2'-O-methyl ribonucleotide
  modified_base 2: mod_base = OTHER; note = 2'-O-methyl ribonucleotide
  modified_base 3: mod_base = OTHER; note = 2'-O-methyl ribonucleotide
  modified_base 21: mod_base = OTHER; note = 2'-O-methyl ribonucleotide
  modified_base 28: mod_base = OTHER; note = 2'-O-methyl ribonucleotide
  modified_base 29: mod_base = OTHER; note = 2'-O-methyl ribonucleotide
  modified_base 30: mod_base = OTHER; note = 2'-O-methyl ribonucleotide
  modified_base 31: mod_base = OTHER; note = 2'-O-methyl ribonucleotide
  modified_base 32: mod_base = OTHER; note = 2'-O-methyl ribonucleotide
  modified_base 34: mod_base = OTHER; note = 2'-O-methyl ribonucleotide
  modified_base 35: mod_base = OTHER; note = 2'-O-methyl ribonucleotide
  modified_base 36: mod_base = OTHER; note = 2'-O-methyl ribonucleotide
  modified_base 37: mod_base = OTHER; note = 2'-O-methyl ribonucleotide
  modified_base 38: mod_base = OTHER; note = 2'-O-methyl ribonucleotide
  modified_base 39: mod_base = OTHER; note = 2'-O-methyl ribonucleotide
  modified_base 40: mod_base = OTHER; note = 2'-O-methyl ribonucleotide
  modified_base 41: mod_base = OTHER; note = 2'-O-methyl ribonucleotide
  modified_base 42: mod_base = OTHER; note = 2'-O-methyl ribonucleotide
  modified_base 46: mod_base = OTHER; note = 2'-O-methyl ribonucleotide
  modified_base 48: mod_base = OTHER; note = 2'-O-methyl ribonucleotide
  modified_base 50: mod_base = OTHER; note = 2'-O-methyl ribonucleotide
  modified_base 52: mod_base = OTHER; note = 2'-O-methyl ribonucleotide
  modified_base 53: mod_base = OTHER; note = 2'-O-methyl ribonucleotide
  modified_base 54: mod_base = OTHER; note = 2'-O-methyl ribonucleotide
  modified_base 55: mod_base = OTHER; note = 2'-O-methyl ribonucleotide
  modified_base 56: mod_base = OTHER; note = 2'-O-methyl ribonucleotide
  modified_base 57: mod_base = OTHER; note = 2'-O-methyl ribonucleotide
  modified_base 60: mod_base = OTHER; note = 2'-O-methyl ribonucleotide
  modified_base 61: mod_base = OTHER; note = 2'-O-methyl ribonucleotide
  modified_base 66: mod_base = OTHER; note = 2'-O-methyl ribonucleotide
  modified_base 67: mod_base = OTHER; note = 2'-O-methyl ribonucleotide
  modified_base 70: mod_base = OTHER; note = 2'-O-methyl ribonucleotide
  modified_base 71: mod_base = OTHER; note = 2'-O-methyl ribonucleotide
  modified_base 72: mod_base = OTHER; note = 2'-O-methyl ribonucleotide
  modified_base 74: mod_base = OTHER; note = 2'-O-methyl ribonucleotide
  modified_base 75: mod_base = OTHER; note = 2'-O-methyl ribonucleotide
  modified_base 76: mod_base = OTHER; note = 2'-O-methyl ribonucleotide
  modified_base 77: mod_base = OTHER; note = 2'-O-methyl ribonucleotide
  modified_base 78: mod_base = OTHER; note = 2'-O-methyl ribonucleotide
  modified_base 79: mod_base = OTHER; note = 2'-O-methyl ribonucleotide
  modified_base 80: mod_base = OTHER; note = 2'-O-methyl ribonucleotide
  modified_base 81: mod_base = OTHER; note = 2'-O-methyl ribonucleotide
  modified_base 83: mod_base = OTHER; note = 2'-O-methyl ribonucleotide
  modified_base 84: mod_base = OTHER; note = 2'-O-methyl ribonucleotide
  modified_base 85: mod_base = OTHER; note = 2'-O-methyl ribonucleotide
  modified_base 86: mod_base = OTHER; note = 2'-O-methyl ribonucleotide
  modified_base 87: mod_base = OTHER; note = 2'-O-methyl ribonucleotide
  modified_base 88: mod_base = OTHER; note = 2'-O-methyl ribonucleotide
  modified_base 89: mod_base = OTHER; note = 2'-O-methyl ribonucleotide
  modified_base 90: mod_base = OTHER; note = 2'-O-methyl ribonucleotide
  modified_base 91: mod_base = OTHER; note = 2'-O-methyl ribonucleotide
  modified_base 92: mod_base = OTHER; note = 2'-O-methyl ribonucleotide
  modified_base 93: mod_base = OTHER; note = 2'-O-methyl ribonucleotide
  modified_base 94: mod_base = OTHER; note = 2'-O-methyl ribonucleotide
  modified_base 95: mod_base = OTHER; note = 2'-O-methyl ribonucleotide
  modified_base 96: mod_base = OTHER; note = 2'-O-methyl ribonucleotide
  modified_base 97: mod_base = OTHER; note = 2'-O-methyl ribonucleotide
  modified_base 98: mod_base = OTHER; note = 2'-O-methyl ribonucleotide
  modified_base 99: mod_base = OTHER; note = 2'-O-methyl ribonucleotide
  modified_base 100: mod_base = OTHER; note = 2'-O-methyl ribonucleotide
  modified_base 101: mod_base = OTHER; note = uniform ribonucleotides (A, C, G, inosine or U), deoxynucleotides (A, G, C, inosine or T), ribonebularine, 2'-O-methylnebularine or deoxynebularine
  modified_base 102: mod_base = OTHER; note = uniform ribonucleotides (A, C, G, inosine or U), deoxynucleotides (A, G, C, inosine or T), ribonebularine, 2'-O-methylnebularine or deoxynebularine
  modified_base 103: mod_base = OTHER; note = uniform ribonucleotides (A, C, G, inosine or U), deoxynucleotides (A, G, C, inosine or T), ribonebularine, 2'-O-methylnebularine or deoxynebularine
  modified_base 1..3: mod_base = OTHER; note = phosphorothioate linkage
  modified_base 25..26: mod_base = OTHER; note = phosphorothioate linkage
  modified_base 45..46: mod_base = OTHER; note = phosphorothioate linkage
  modified_base 97..100: mod_base = OTHER; note = phosphorothioate linkage
  misc_feature 1..100: note = RNA
  misc_feature 101..103: note = Optionally DNA or RNA

SEQ ID NO: 2948 - DNA, 103 bp, synthetic construct; identical to SEQ ID NO: 1797
  source 1..103: mol_type = other DNA
  modified_base 1: mod_base = OTHER; note = 2'-O-methyl ribonucleotide
  modified_base 2: mod_base = OTHER; note = 2'-O-methyl ribonucleotide
  modified_base 3: mod_base = OTHER; note = 2'-O-methyl ribonucleotide
  modified_base 21: mod_base = OTHER; note = 2'-O-methyl ribonucleotide
  modified_base 28: mod_base = OTHER; note = 2'-O-methyl ribonucleotide
  modified_base 29: mod_base = OTHER; note = 2'-O-methyl ribonucleotide
  modified_base 30: mod_base = OTHER; note = 2'-O-methyl ribonucleotide
  modified_base 31: mod_base = OTHER; note = 2'-O-methyl ribonucleotide
  modified_base 32: mod_base = OTHER; note = 2'-O-methyl ribonucleotide
  modified_base 33: mod_base = OTHER; note = 2'-O-methyl ribonucleotide
  modified_base 34: mod_base = OTHER; note = 2'-O-methyl ribonucleotide
  modified_base 35: mod_base = OTHER; note = 2'-O-methyl ribonucleotide
  modified_base 36: mod_base = OTHER; note = 2'-O-methyl ribonucleotide
  modified_base 37: mod_base = OTHER; note = 2'-O-methyl ribonucleotide
  modified_base 38: mod_base = OTHER; note = 2'-O-methyl ribonucleotide
  modified_base 39: mod_base = OTHER; note = 2'-O-methyl ribonucleotide
  modified_base 40: mod_base = OTHER; note = 2'-O-methyl ribonucleotide
  modified_base 41: mod_base = OTHER; note = 2'-O-methyl ribonucleotide
  modified_base 42: mod_base = OTHER; note = 2'-O-methyl ribonucleotide
  modified_base 46: mod_base = OTHER; note = 2'-O-methyl ribonucleotide
  modified_base 48: mod_base = OTHER; note = 2'-O-methyl ribonucleotide
  modified_base 50: mod_base = OTHER; note = 2'-O-methyl ribonucleotide
  modified_base 52: mod_base = OTHER; note = 2'-O-methyl ribonucleotide
  modified_base 53: mod_base = OTHER; note = 2'-O-methyl ribonucleotide
  modified_base 54: mod_base = OTHER; note = 2'-O-methyl ribonucleotide
  modified_base 57: mod_base = OTHER; note = 2'-O-methyl ribonucleotide
  modified_base 61: mod_base = OTHER; note = 2'-O-methyl ribonucleotide
  modified_base 66: mod_base = OTHER; note = 2'-O-methyl ribonucleotide
  modified_base 67: mod_base = OTHER; note = 2'-O-methyl ribonucleotide
  modified_base 70: mod_base = OTHER; note = 2'-O-methyl ribonucleotide
  modified_base 71: mod_base = OTHER; note = 2'-O-methyl ribonucleotide
  modified_base 72: mod_base = OTHER; note = 2'-O-methyl ribonucleotide
  modified_base 74: mod_base = OTHER; note = 2'-O-methyl ribonucleotide
  modified_base 75: mod_base = OTHER; note = 2'-O-methyl ribonucleotide
  modified_base 76: mod_base = OTHER; note = 2'-O-methyl ribonucleotide
  modified_base 77: mod_base = OTHER; note = 2'-O-methyl ribonucleotide
  modified_base 78: mod_base = OTHER; note = 2'-O-methyl ribonucleotide
  modified_base 79: mod_base = OTHER; note = 2'-O-methyl ribonucleotide
  modified_base 80: mod_base = OTHER; note = 2'-O-methyl ribonucleotide
  modified_base 82: mod_base = OTHER; note = 2'-O-methyl ribonucleotide
  modified_base 83: mod_base = OTHER; note = 2'-O-methyl ribonucleotide
  modified_base 84: mod_base = OTHER; note = 2'-O-methyl ribonucleotide
  modified_base 85: mod_base = OTHER; note = 2'-O-methyl ribonucleotide
  modified_base 86: mod_base = OTHER; note = 2'-O-methyl ribonucleotide
  modified_base 87: mod_base = OTHER; note = 2'-O-methyl ribonucleotide
  modified_base 89: mod_base = OTHER; note = 2'-O-methyl ribonucleotide
  modified_base 92: mod_base = OTHER; note = 2'-O-methyl ribonucleotide
  modified_base 93: mod_base = OTHER; note = 2'-O-methyl ribonucleotide
  modified_base 94: mod_base = OTHER; note = 2'-O-methyl ribonucleotide
  modified_base 95: mod_base = OTHER; note = 2'-O-methyl ribonucleotide
  modified_base 96: mod_base = OTHER; note = 2'-O-methyl ribonucleotide
  modified_base 97: mod_base = OTHER; note = 2'-O-methyl ribonucleotide
  modified_base 98: mod_base = OTHER; note = 2'-O-methyl ribonucleotide
  modified_base 99: mod_base = OTHER; note = 2'-O-methyl ribonucleotide
  modified_base 100: mod_base = OTHER; note = 2'-O-methyl ribonucleotide
  modified_base 101: mod_base = OTHER; note = uniform ribonucleotides (A, C, G, inosine or U), deoxynucleotides (A, G, C, inosine or T), ribonebularine, 2'-O-methylnebularine or deoxynebularine
  modified_base 102: mod_base = OTHER; note = uniform ribonucleotides (A, C, G, inosine or U), deoxynucleotides (A, G, C, inosine or T), ribonebularine, 2'-O-methylnebularine or deoxynebularine
  modified_base 103: mod_base = OTHER; note = uniform ribonucleotides (A, C, G, inosine or U), deoxynucleotides (A, G, C, inosine or T), ribonebularine, 2'-O-methylnebularine or deoxynebularine
  modified_base 1..3: mod_base = OTHER; note = phosphorothioate linkage
  modified_base 25..26: mod_base = OTHER; note = phosphorothioate linkage
  modified_base 45..46: mod_base = OTHER; note = phosphorothioate linkage
  modified_base 97..100: mod_base = OTHER; note = phosphorothioate linkage
  misc_feature 1..100: note = RNA
  misc_feature 101..103: note = Optionally DNA or RNA

SEQ ID NO: 2949 - DNA, 103 bp, synthetic construct; identical to SEQ ID NO: 1797
  source 1..103: mol_type = other DNA
  modified_base 1: mod_base = OTHER; note = 2'-O-methyl ribonucleotide
  modified_base 2: mod_base = OTHER; note = 2'-O-methyl ribonucleotide
  modified_base 3: mod_base = OTHER; note = 2'-O-methyl ribonucleotide
  modified_base 21: mod_base = OTHER; note = 2'-O-methyl ribonucleotide
  modified_base 28: mod_base = OTHER; note = 2'-O-methyl ribonucleotide
  modified_base 29: mod_base = OTHER; note = 2'-O-methyl ribonucleotide
  modified_base 30: mod_base = OTHER; note = 2'-O-methyl ribonucleotide
  modified_base 31: mod_base = OTHER; note = 2'-O-methyl ribonucleotide
  modified_base 32: mod_base = OTHER; note = 2'-O-methyl ribonucleotide
  modified_base 33: mod_base = OTHER; note = 2'-O-methyl ribonucleotide
  modified_base 34: mod_base = OTHER; note = 2'-O-methyl ribonucleotide
  modified_base 35: mod_base = OTHER; note = 2'-O-methyl ribonucleotide
  modified_base 36: mod_base = OTHER; note = 2'-O-methyl ribonucleotide
  modified_base 37: mod_base = OTHER; note = 2'-O-methyl ribonucleotide
  modified_base 38: mod_base = OTHER; note = 2'-O-methyl ribonucleotide
  modified_base 39: mod_base = OTHER; note = 2'-O-methyl ribonucleotide
  modified_base 40: mod_base = OTHER; note = 2'-O-methyl ribonucleotide
  modified_base 41: mod_base = OTHER; note = 2'-O-methyl ribonucleotide
  modified_base 42: mod_base = OTHER; note = 2'-O-methyl ribonucleotide
  modified_base 46: mod_base = OTHER; note = 2'-O-methyl ribonucleotide
  modified_base 48: mod_base = OTHER; note = 2'-O-methyl ribonucleotide
  modified_base 50: mod_base = OTHER; note = 2'-O-methyl ribonucleotide
  modified_base 52: mod_base = OTHER; note = 2'-O-methyl ribonucleotide
  modified_base 53: mod_base = OTHER; note = 2'-O-methyl ribonucleotide
  modified_base 54: mod_base = OTHER; note = 2'-O-methyl ribonucleotide
  modified_base 55: mod_base = OTHER; note = 2'-O-methyl ribonucleotide
  modified_base 56: mod_base = OTHER; note = 2'-O-methyl ribonucleotide
  modified_base 57: mod_base = OTHER; note = 2'-O-methyl ribonucleotide
  modified_base 60: mod_base = OTHER; note = 2'-O-methyl ribonucleotide
  modified_base 61: mod_base = OTHER; note = 2'-O-methyl ribonucleotide
  modified_base 66: mod_base = OTHER; note = 2'-O-methyl ribonucleotide
  modified_base 67: mod_base = OTHER; note = 2'-O-methyl ribonucleotide
  modified_base 70: mod_base = OTHER; note = 2'-O-methyl ribonucleotide
  modified_base 71: mod_base = OTHER; note = 2'-O-methyl ribonucleotide
  modified_base 72: mod_base = OTHER; note = 2'-O-methyl ribonucleotide
  modified_base 74: mod_base = OTHER; note = 2'-O-methyl ribonucleotide
  modified_base 75: mod_base = OTHER; note = 2'-O-methyl ribonucleotide
  modified_base 76: mod_base = OTHER; note = 2'-O-methyl ribonucleotide
  modified_base 77: mod_base = OTHER; note = 2'-O-methyl ribonucleotide
  modified_base 78: mod_base = OTHER; note = 2'-O-methyl ribonucleotide
  modified_base 79: mod_base = OTHER; note = 2'-O-methyl ribonucleotide
  modified_base 80: mod_base = OTHER; note = 2'-O-methyl ribonucleotide
  modified_base 82: mod_base = OTHER; note = 2'-O-methyl ribonucleotide
  modified_base 83: mod_base = OTHER; note = 2'-O-methyl ribonucleotide
  modified_base 84: mod_base = OTHER; note = 2'-O-methyl ribonucleotide
  modified_base 85: mod_base = OTHER; note = 2'-O-methyl ribonucleotide
  modified_base 86: mod_base = OTHER; note = 2'-O-methyl ribonucleotide
  modified_base 87: mod_base = OTHER; note = 2'-O-methyl ribonucleotide
  modified_base 89: mod_base = OTHER; note = 2'-O-methyl ribonucleotide
  modified_base 92: mod_base = OTHER; note = 2'-O-methyl ribonucleotide
  modified_base 93: mod_base = OTHER; note = 2'-O-methyl ribonucleotide
  modified_base 94: mod_base = OTHER; note = 2'-O-methyl ribonucleotide
  modified_base 95: mod_base = OTHER; note = 2'-O-methyl ribonucleotide
  modified_base 96: mod_base = OTHER; note = 2'-O-methyl ribonucleotide
  modified_base 97: mod_base = OTHER; note = 2'-O-methyl ribonucleotide
  modified_base 98: mod_base = OTHER; note = 2'-O-methyl ribonucleotide
  modified_base 99: mod_base = OTHER; note = 2'-O-methyl ribonucleotide
  modified_base 100: mod_base = OTHER; note = 2'-O-methyl ribonucleotide
  modified_base 101: mod_base = OTHER; note = uniform ribonucleotides (A, C, G, inosine or U), deoxynucleotides (A, G, C, inosine or T), ribonebularine, 2'-O-methylnebularine or deoxynebularine
  modified_base 102: mod_base = OTHER; note = uniform ribonucleotides (A, C, G, inosine or U), deoxynucleotides (A, G, C, inosine or T), ribonebularine, 2'-O-methylnebularine or deoxynebularine
  modified_base 103: mod_base = OTHER; note = uniform ribonucleotides (A, C, G, inosine or U), deoxynucleotides (A, G, C, inosine or T), ribonebularine, 2'-O-methylnebularine or deoxynebularine
  modified_base 1..3: mod_base = OTHER; note = phosphorothioate linkage
  modified_base 25..26: mod_base = OTHER; note = phosphorothioate linkage
  modified_base 45..46: mod_base = OTHER; note = phosphorothioate linkage
  modified_base 97..100: mod_base = OTHER; note = phosphorothioate linkage
  misc_feature 1..100: note = RNA
  misc_feature 101..103: note = Optionally DNA or RNA

SEQ ID NO: 2950 - DNA, 103 bp, synthetic construct; identical to SEQ ID NO: 1797
  source 1..103: mol_type = other DNA
  modified_base 1: mod_base = OTHER; note = 2'-O-methyl ribonucleotide
  modified_base 2: mod_base = OTHER; note = 2'-O-methyl ribonucleotide
  modified_base 3: mod_base = OTHER; note = 2'-O-methyl ribonucleotide
  modified_base 21: mod_base = OTHER; note = 2'-O-methyl ribonucleotide
  modified_base 28: mod_base = OTHER; note = 2'-O-methyl ribonucleotide
  modified_base 29: mod_base = OTHER; note = 2'-O-methyl ribonucleotide
  modified_base 30: mod_base = OTHER; note = 2'-O-methyl ribonucleotide
  modified_base 31: mod_base = OTHER; note = 2'-O-methyl ribonucleotide
  modified_base 32: mod_base = OTHER; note = 2'-O-methyl ribonucleotide
  modified_base 33: mod_base = OTHER; note = 2'-O-methyl ribonucleotide
  modified_base 34: mod_base = OTHER; note = 2'-O-methyl ribonucleotide
  modified_base 35: mod_base = OTHER; note = 2'-O-methyl ribonucleotide
  modified_base 36: mod_base = OTHER; note = 2'-O-methyl ribonucleotide
  modified_base 37: mod_base = OTHER; note = 2'-O-methyl ribonucleotide
  modified_base 38: mod_base = OTHER; note = 2'-O-methyl ribonucleotide
  modified_base 39: mod_base = OTHER; note = 2'-O-methyl ribonucleotide
  modified_base 40: mod_base = OTHER; note = 2'-O-methyl ribonucleotide
  modified_base 41: mod_base = OTHER; note = 2'-O-methyl ribonucleotide
  modified_base 42: mod_base = OTHER; note = 2'-O-methyl ribonucleotide
  modified_base 46: mod_base = OTHER; note = 2'-O-methyl ribonucleotide
  modified_base 48: mod_base = OTHER; note = 2'-O-methyl ribonucleotide
  modified_base 50: mod_base = OTHER; note = 2'-O-methyl ribonucleotide
  modified_base 52: mod_base = OTHER; note = 2'-O-methyl ribonucleotide
  modified_base 53: mod_base = OTHER; note = 2'-O-methyl ribonucleotide
  modified_base 54: mod_base = OTHER; note = 2'-O-methyl ribonucleotide
  modified_base 57: mod_base = OTHER; note = 2'-O-methyl ribonucleotide
  modified_base 61: mod_base = OTHER; note = 2'-O-methyl ribonucleotide
  modified_base 66: mod_base = OTHER; note = 2'-O-methyl ribonucleotide
  modified_base 67: mod_base = OTHER; note = 2'-O-methyl ribonucleotide
  modified_base 70: mod_base = OTHER; note = 2'-O-methyl ribonucleotide
  modified_base 71: mod_base = OTHER; note = 2'-O-methyl ribonucleotide
  modified_base 72: mod_base = OTHER; note = 2'-O-methyl ribonucleotide
  modified_base 73: mod_base = OTHER; note = 2'-O-methyl ribonucleotide
  modified_base 74: mod_base = OTHER; note = 2'-O-methyl ribonucleotide
  modified_base 75: mod_base = OTHER; note = 2'-O-methyl ribonucleotide
  modified_base 76: mod_base = OTHER; note = 2'-O-methyl ribonucleotide
  modified_base 77: mod_base = OTHER; note = 2'-O-methyl ribonucleotide
  modified_base 78: mod_base = OTHER; note = 2'-O-methyl ribonucleotide
  modified_base 79: mod_base = OTHER; note = 2'-O-methyl ribonucleotide
  modified_base 80: mod_base = OTHER; note = 2'-O-methyl ribonucleotide
  modified_base 82: mod_base = OTHER; note = 2'-O-methyl ribonucleotide
  modified_base 83: mod_base = OTHER; note = 2'-O-methyl ribonucleotide
  modified_base 84: mod_base = OTHER; note = 2'-O-methyl ribonucleotide
  modified_base 85: mod_base = OTHER; note = 2'-O-methyl ribonucleotide
  modified_base 86: mod_base = OTHER; note = 2'-O-methyl ribonucleotide
  modified_base 87: mod_base = OTHER; note = 2'-O-methyl ribonucleotide
  modified_base 89: mod_base = OTHER; note = 2'-O-methyl ribonucleotide
  modified_base 92: mod_base = OTHER; note = 2'-O-methyl ribonucleotide
  modified_base 93: mod_base = OTHER; note = 2'-O-methyl ribonucleotide
  modified_base 94: mod_base = OTHER; note = 2'-O-methyl ribonucleotide
  modified_base 95: mod_base = OTHER; note = 2'-O-methyl ribonucleotide
  modified_base 96: mod_base = OTHER; note = 2'-O-methyl ribonucleotide
  modified_base 97: mod_base = OTHER; note = 2'-O-methyl ribonucleotide
  modified_base 98: mod_base = OTHER; note = 2'-O-methyl ribonucleotide
  modified_base 99: mod_base = OTHER; note = 2'-O-methyl ribonucleotide
  modified_base 100: mod_base = OTHER; note = 2'-O-methyl ribonucleotide
  modified_base 101: mod_base = OTHER; note = uniform ribonucleotides (A, C, G, inosine or U), deoxynucleotides (A, G, C, inosine or T), ribonebularine, 2'-O-methylnebularine or deoxynebularine
  modified_base 102: mod_base = OTHER; note = uniform ribonucleotides (A, C, G, inosine or U), deoxynucleotides (A, G, C, inosine or T), ribonebularine, 2'-O-methylnebularine or deoxynebularine
  modified_base 103: mod_base = OTHER; note = uniform ribonucleotides (A, C, G, inosine or U), deoxynucleotides (A, G, C, inosine or T), ribonebularine, 2'-O-methylnebularine or deoxynebularine
  modified_base 1..3: mod_base = OTHER; note = phosphorothioate linkage
  modified_base 25..26: mod_base = OTHER; note = phosphorothioate linkage
  modified_base 45..46: mod_base = OTHER; note = phosphorothioate linkage
  modified_base 97..100: mod_base = OTHER; note = phosphorothioate linkage
  misc_feature 1..100: note = RNA
  misc_feature 101..103: note = Optionally DNA or RNA

SEQ ID NO: 2951 - DNA, 103 bp, synthetic construct; identical to SEQ ID NO: 1797
  source 1..103: mol_type = other DNA
  modified_base 1: mod_base = OTHER; note = 2'-O-methyl ribonucleotide
  modified_base 2: mod_base = OTHER; note = 2'-O-methyl ribonucleotide
  modified_base 3: mod_base = OTHER; note = 2'-O-methyl ribonucleotide
  modified_base 21: mod_base = OTHER; note = 2'-O-methyl ribonucleotide
  modified_base 28: mod_base = OTHER; note = 2'-O-methyl ribonucleotide
  modified_base 29: mod_base = OTHER; note = 2'-O-methyl ribonucleotide
  modified_base 30: mod_base = OTHER; note = 2'-O-methyl ribonucleotide
  modified_base 31: mod_base = OTHER; note = 2'-O-methyl ribonucleotide
  modified_base 32: mod_base = OTHER; note = 2'-O-methyl ribonucleotide
  modified_base 33: mod_base = OTHER; note = 2'-O-methyl ribonucleotide
  modified_base 34: mod_base = OTHER; note = 2'-O-methyl ribonucleotide
  modified_base 35: mod_base = OTHER; note = 2'-O-methyl ribonucleotide
  modified_base 36: mod_base = OTHER; note = 2'-O-methyl ribonucleotide
  modified_base 37: mod_base = OTHER; note = 2'-O-methyl ribonucleotide
  modified_base 38: mod_base = OTHER; note = 2'-O-methyl ribonucleotide
  modified_base 39: mod_base = OTHER; note = 2'-O-methyl ribonucleotide
  modified_base 40: mod_base = OTHER; note = 2'-O-methyl ribonucleotide
  modified_base 41: mod_base = OTHER; note = 2'-O-methyl ribonucleotide
  modified_base 42: mod_base = OTHER; note = 2'-O-methyl ribonucleotide
  modified_base 46: mod_base = OTHER; note = 2'-O-methyl ribonucleotide
  modified_base 48: mod_base = OTHER; note = 2'-O-methyl ribonucleotide
  modified_base 50: mod_base = OTHER; note = 2'-O-methyl ribonucleotide
  modified_base 52: mod_base = OTHER; note = 2'-O-methyl ribonucleotide
  modified_base 53: mod_base = OTHER; note = 2'-O-methyl ribonucleotide
  modified_base 54: mod_base = OTHER; note = 2'-O-methyl ribonucleotide
  modified_base 57: mod_base = OTHER; note = 2'-O-methyl ribonucleotide
  modified_base 61: mod_base = OTHER; note = 2'-O-methyl ribonucleotide
  modified_base 66: mod_base = OTHER; note = 2'-O-methyl ribonucleotide
  modified_base 67: mod_base = OTHER; note = 2'-O-methyl ribonucleotide
  modified_base 70: mod_base = OTHER; note = 2'-O-methyl ribonucleotide
  modified_base 71: mod_base = OTHER; note = 2'-O-methyl ribonucleotide
  modified_base 72: mod_base = OTHER; note = 2'-O-methyl ribonucleotide
  modified_base 73: mod_base = OTHER; note = 2'-O-methyl ribonucleotide
  modified_base 74: mod_base = OTHER; note = 2'-O-methyl ribonucleotide
  modified_base 75: mod_base = OTHER; note = 2'-O-methyl ribonucleotide
  modified_base 76: mod_base = OTHER; note = 2'-O-methyl ribonucleotide
  modified_base 77: mod_base = OTHER; note = 2'-O-methyl ribonucleotide
  modified_base 78: mod_base = OTHER; note = 2'-O-methyl ribonucleotide
  modified_base 79: mod_base = OTHER; note = 2'-O-methyl ribonucleotide
  modified_base 80: mod_base = OTHER; note = 2'-O-methyl ribonucleotide
  modified_base 82: mod_base = OTHER; note = 2'-O-methyl ribonucleotide
  modified_base 83: mod_base = OTHER; note = 2'-O-methyl ribonucleotide
  modified_base 84: mod_base = OTHER; note = 2'-O-methyl ribonucleotide
  modified_base 85: mod_base = OTHER; note = 2'-O-methyl ribonucleotide
  modified_base 86: mod_base = OTHER; note = 2'-O-methyl ribonucleotide
  modified_base 87: mod_base = OTHER; note = 2'-O-methyl ribonucleotide
  modified_base 89: mod_base = OTHER; note = 2'-O-methyl ribonucleotide
  modified_base 91: mod_base = OTHER; note = 2'-O-methyl ribonucleotide
  modified_base 92: mod_base = OTHER; note = 2'-O-methyl ribonucleotide
  modified_base 93: mod_base = OTHER; note = 2'-O-methyl ribonucleotide
  modified_base 94: mod_base = OTHER; note = 2'-O-methyl ribonucleotide
  modified_base 95: mod_base = OTHER; note = 2'-O-methyl ribonucleotide
  modified_base 96: mod_base = OTHER; note = 2'-O-methyl ribonucleotide
  modified_base 97: mod_base = OTHER; note = 2'-O-methyl ribonucleotide
  modified_base 98: mod_base = OTHER; note = 2'-O-methyl ribonucleotide
  modified_base 99: mod_base = OTHER; note = 2'-O-methyl ribonucleotide
  modified_base 100: mod_base = OTHER; note = 2'-O-methyl ribonucleotide
  modified_base 101: mod_base = OTHER; note = uniform ribonucleotides (A, C, G, inosine or U), deoxynucleotides (A, G, C, inosine or T), ribonebularine, 2'-O-methylnebularine or deoxynebularine
  modified_base 102: mod_base = OTHER; note = uniform ribonucleotides (A, C, G, inosine or U), deoxynucleotides (A, G, C, inosine or T), ribonebularine, 2'-O-methylnebularine or deoxynebularine
  modified_base 103: mod_base = OTHER; note = uniform ribonucleotides (A, C, G, inosine or U), deoxynucleotides (A, G, C, inosine or T), ribonebularine, 2'-O-methylnebularine or deoxynebularine
  modified_base 1..3: mod_base = OTHER; note = phosphorothioate linkage
  modified_base 25..26: mod_base = OTHER; note = phosphorothioate linkage
  modified_base 45..46: mod_base = OTHER; note = phosphorothioate linkage
  modified_base 97..100: mod_base = OTHER; note = phosphorothioate linkage
  misc_feature 1..100: note = RNA
  misc_feature 101..103: note = Optionally DNA or RNA

SEQ ID NO: 2952 - DNA, 103 bp, synthetic construct; identical to SEQ ID NO: 1797
  source 1..103: mol_type = other DNA
  modified_base 1: mod_base = OTHER; note = 2'-O-methyl ribonucleotide
  modified_base 2: mod_base = OTHER; note = 2'-O-methyl ribonucleotide
  modified_base 3: mod_base = OTHER; note = 2'-O-methyl ribonucleotide
  modified_base 21: mod_base = OTHER; note = 2'-O-methyl ribonucleotide
  modified_base 28: mod_base = OTHER; note = 2'-O-methyl ribonucleotide
  modified_base 29: mod_base = OTHER; note = 2'-O-methyl ribonucleotide
  modified_base 30: mod_base = OTHER; note = 2'-O-methyl ribonucleotide
  modified_base 31: mod_base = OTHER; note = 2'-O-methyl ribonucleotide
  modified_base 32: mod_base = OTHER; note = 2'-O-methyl ribonucleotide
  modified_base 34: mod_base = OTHER; note = 2'-O-methyl ribonucleotide
  modified_base 35: mod_base = OTHER; note = 2'-O-methyl ribonucleotide
  modified_base 36: mod_base = OTHER; note = 2'-O-methyl ribonucleotide
  modified_base 37: mod_base = OTHER; note = 2'-O-methyl ribonucleotide
  modified_base 38: mod_base = OTHER; note = 2'-O-methyl ribonucleotide
  modified_base 39: mod_base = OTHER; note = 2'-O-methyl ribonucleotide
  modified_base 40: mod_base = OTHER; note = 2'-O-methyl ribonucleotide
  modified_base 41: mod_base = OTHER; note = 2'-O-methyl ribonucleotide
  modified_base 42: mod_base = OTHER; note = 2'-O-methyl ribonucleotide
  modified_base 46: mod_base = OTHER; note = 2'-O-methyl ribonucleotide
  modified_base 48: mod_base = OTHER; note = 2'-O-methyl ribonucleotide
  modified_base 50: mod_base = OTHER; note = 2'-O-methyl ribonucleotide
  modified_base 52: mod_base = OTHER; note = 2'-O-methyl ribonucleotide
  modified_base 53: mod_base = OTHER; note = 2'-O-methyl ribonucleotide
  modified_base 54: mod_base = OTHER; note = 2'-O-methyl ribonucleotide
  modified_base 57: mod_base = OTHER; note = 2'-O-methyl ribonucleotide
  modified_base 61: mod_base = OTHER; note = 2'-O-methyl ribonucleotide
  modified_base 66: mod_base = OTHER; note = 2'-O-methyl ribonucleotide
  modified_base 67: mod_base = OTHER; note = 2'-O-methyl ribonucleotide
  modified_base 70: mod_base = OTHER; note = 2'-O-methyl ribonucleotide
  modified_base 71: mod_base = OTHER; note = 2'-O-methyl ribonucleotide
  modified_base 72: mod_base = OTHER; note = 2'-O-methyl ribonucleotide
  modified_base 73: mod_base = OTHER; note = 2'-O-methyl ribonucleotide
  modified_base 74: mod_base = OTHER; note = 2'-O-methyl ribonucleotide
  modified_base 75: mod_base = OTHER; note = 2'-O-methyl ribonucleotide
  modified_base 76: mod_base = OTHER; note = 2'-O-methyl ribonucleotide
  modified_base 77: mod_base = OTHER; note = 2'-O-methyl ribonucleotide
  modified_base 78: mod_base = OTHER; note = 2'-O-methyl ribonucleotide
  modified_base 79: mod_base = OTHER; note = 2'-O-methyl ribonucleotide
  modified_base 80: mod_base = OTHER; note = 2'-O-methyl ribonucleotide
  modified_base 82: mod_base = OTHER; note = 2'-O-methyl ribonucleotide
  modified_base 83: mod_base = OTHER; note = 2'-O-methyl ribonucleotide
  modified_base 84: mod_base = OTHER; note = 2'-O-methyl ribonucleotide
  modified_base 85: mod_base = OTHER; note = 2'-O-methyl ribonucleotide
  modified_base 86: mod_base = OTHER; note = 2'-O-methyl ribonucleotide
  modified_base 87: mod_base = OTHER; note = 2'-O-methyl ribonucleotide
  modified_base 89: mod_base = OTHER; note = 2'-O-methyl ribonucleotide
  modified_base 92: mod_base = OTHER; note = 2'-O-methyl ribonucleotide
  modified_base 93: mod_base = OTHER; note = 2'-O-methyl ribonucleotide
  modified_base 94: mod_base = OTHER; note = 2'-O-methyl ribonucleotide
  modified_base 95: mod_base = OTHER; note = 2'-O-methyl ribonucleotide
  modified_base 96: mod_base = OTHER; note = 2'-O-methyl ribonucleotide
  modified_base 97: mod_base = OTHER; note = 2'-O-methyl ribonucleotide
  modified_base 98: mod_base = OTHER; note = 2'-O-methyl ribonucleotide
  modified_base 99: mod_base = OTHER; note = 2'-O-methyl ribonucleotide
  modified_base 100: mod_base = OTHER; note = 2'-O-methyl ribonucleotide
  modified_base 101: mod_base = OTHER; note = uniform ribonucleotides (A, C, G, inosine or U), deoxynucleotides (A, G, C, inosine or T), ribonebularine, 2'-O-methylnebularine or deoxynebularine
  modified_base 102: mod_base = OTHER; note = uniform ribonucleotides (A, C, G, inosine or U), deoxynucleotides (A, G, C, inosine or T), ribonebularine, 2'-O-methylnebularine or deoxynebularine
  modified_base 103: mod_base = OTHER; note = uniform ribonucleotides (A, C, G, inosine or U), deoxynucleotides (A, G, C, inosine or T), ribonebularine, 2'-O-methylnebularine or deoxynebularine
  modified_base 1..3: mod_base = OTHER; note = phosphorothioate linkage
  modified_base 25..26: mod_base = OTHER; note = phosphorothioate linkage
  modified_base 45..46: mod_base = OTHER; note = phosphorothioate linkage
  modified_base 97..100: mod_base = OTHER; note = phosphorothioate linkage
  misc_feature 1..100: note = RNA
  misc_feature 101..103: note = Optionally DNA or RNA

SEQ ID NO: 2953 - DNA, 103 bp, synthetic construct; identical to SEQ ID NO: 1797
  source 1..103: mol_type = other DNA
  modified_base 1: mod_base = OTHER; note = 2'-O-methyl ribonucleotide
  modified_base 2: mod_base = OTHER; note = 2'-O-methyl ribonucleotide
  modified_base 3: mod_base = OTHER; note = 2'-O-methyl ribonucleotide
  modified_base 21: mod_base = OTHER; note = 2'-O-methyl ribonucleotide
  modified_base 28: mod_base = OTHER; note = 2'-O-methyl ribonucleotide
  modified_base 29: mod_base = OTHER; note = 2'-O-methyl ribonucleotide
  modified_base 30: mod_base = OTHER; note = 2'-O-methyl ribonucleotide
  modified_base 31: mod_base = OTHER; note = 2'-O-methyl ribonucleotide
  modified_base 32: mod_base = OTHER; note = 2'-O-methyl ribonucleotide
  modified_base 34: mod_base = OTHER; note = 2'-O-methyl ribonucleotide
  modified_base 35: mod_base = OTHER; note = 2'-O-methyl ribonucleotide
  modified_base 36: mod_base = OTHER; note = 2'-O-methyl ribonucleotide
  modified_base 37: mod_base = OTHER; note = 2'-O-methyl ribonucleotide
  modified_base 38: mod_base = OTHER; note = 2'-O-methyl ribonucleotide
  modified_base 39: mod_base = OTHER; note = 2'-O-methyl ribonucleotide
  modified_base 40: mod_base = OTHER; note = 2'-O-methyl ribonucleotide
  modified_base 41: mod_base = OTHER; note = 2'-O-methyl ribonucleotide
  modified_base 42: mod_base = OTHER; note = 2'-O-methyl ribonucleotide
  modified_base 46: mod_base = OTHER; note = 2'-O-methyl ribonucleotide
  modified_base 48: mod_base = OTHER; note = 2'-O-methyl ribonucleotide
  modified_base 50: mod_base = OTHER; note = 2'-O-methyl ribonucleotide
  modified_base 52: mod_base = OTHER; note = 2'-O-methyl ribonucleotide
  modified_base 53: mod_base = OTHER; note = 2'-O-methyl ribonucleotide
  modified_base 54: mod_base = OTHER; note = 2'-O-methyl ribonucleotide
  modified_base 57: mod_base = OTHER; note = 2'-O-methyl ribonucleotide
  modified_base 61: mod_base = OTHER; note = 2'-O-methyl ribonucleotide
  modified_base 66: mod_base = OTHER; note = 2'-O-methyl ribonucleotide
  modified_base 67: mod_base = OTHER; note = 2'-O-methyl ribonucleotide
  modified_base 70: mod_base = OTHER; note = 2'-O-methyl ribonucleotide
  modified_base 71: mod_base = OTHER; note = 2'-O-methyl ribonucleotide
  modified_base 72: mod_base = OTHER; note = 2'-O-methyl ribonucleotide
  modified_base 73: mod_base = OTHER; note = 2'-O-methyl ribonucleotide
  modified_base 74: mod_base = OTHER; note = 2'-O-methyl ribonucleotide
  modified_base 75: mod_base = OTHER; note = 2'-O-methyl ribonucleotide
  modified_base 76: mod_base = OTHER; note = 2'-O-methyl ribonucleotide
  modified_base 77: mod_base = OTHER; note = 2'-O-methyl ribonucleotide
  modified_base 78: mod_base = OTHER; note = 2'-O-methyl ribonucleotide
  modified_base 79: mod_base = OTHER; note = 2'-O-methyl ribonucleotide
  modified_base 80: mod_base = OTHER; note = 2'-O-methyl ribonucleotide
  modified_base 82: mod_base = OTHER; note = 2'-O-methyl ribonucleotide
  modified_base 83: mod_base = OTHER; note = 2'-O-methyl ribonucleotide
  modified_base 84: mod_base = OTHER; note = 2'-O-methyl ribonucleotide
  modified_base 85: mod_base = OTHER; note = 2'-O-methyl ribonucleotide
  modified_base 86: mod_base = OTHER; note = 2'-O-methyl ribonucleotide
  modified_base 87: mod_base = OTHER; note = 2'-O-methyl ribonucleotide
  modified_base 89: mod_base = OTHER; note = 2'-O-methyl ribonucleotide
  modified_base 91: mod_base = OTHER; note = 2'-O-methyl ribonucleotide
  modified_base 92: mod_base = OTHER; note = 2'-O-methyl ribonucleotide
  modified_base 93: mod_base = OTHER; note = 2'-O-methyl ribonucleotide
  modified_base 94: mod_base = OTHER; note = 2'-O-methyl ribonucleotide
  modified_base 95: mod_base = OTHER; note = 2'-O-methyl ribonucleotide
  modified_base 96: mod_base = OTHER; note = 2'-O-methyl ribonucleotide
  modified_base 97: mod_base = OTHER; note = 2'-O-methyl ribonucleotide
  modified_base 98: mod_base = OTHER; note = 2'-O-methyl ribonucleotide
  modified_base 99: mod_base = OTHER; note = 2'-O-methyl ribonucleotide
  modified_base 100: mod_base = OTHER; note = 2'-O-methyl ribonucleotide
  modified_base 101: mod_base = OTHER; note = uniform ribonucleotides (A, C, G, inosine or U), deoxynucleotides (A, G, C, inosine or T), ribonebularine, 2'-O-methylnebularine or deoxynebularine
  modified_base 102: mod_base = OTHER; note = uniform ribonucleotides (A, C, G, inosine or U), deoxynucleotides (A, G, C, inosine or T), ribonebularine, 2'-O-methylnebularine or deoxynebularine
  modified_base 103: mod_base = OTHER; note = uniform ribonucleotides (A, C, G, inosine or U), deoxynucleotides (A, G, C, inosine or T), ribonebularine, 2'-O-methylnebularine or deoxynebularine
  modified_base 1..3: mod_base = OTHER; note = phosphorothioate linkage
  modified_base 25..26: mod_base = OTHER; note = phosphorothioate linkage
  modified_base 45..46: mod_base = OTHER; note = phosphorothioate linkage
  modified_base 97..100: mod_base = OTHER; note = phosphorothioate linkage
  misc_feature 1..100: note = RNA
  misc_feature 101..103: note = Optionally DNA or RNA

SEQ ID NO: 2954 - DNA, 103 bp, synthetic construct; identical to SEQ ID NO: 1797
  source 1..103: mol_type = other DNA
  modified_base 1: mod_base = OTHER; note = 2'-O-methyl ribonucleotide
  modified_base 2: mod_base = OTHER; note = 2'-O-methyl ribonucleotide
  modified_base 3: mod_base = OTHER; note = 2'-O-methyl ribonucleotide
  modified_base 21: mod_base = OTHER; note = 2'-O-methyl ribonucleotide
  modified_base 28: mod_base = OTHER; note = 2'-O-methyl ribonucleotide
  modified_base 29: mod_base = OTHER; note = 2'-O-methyl ribonucleotide
  modified_base 30: mod_base = OTHER; note = 2'-O-methyl ribonucleotide
  modified_base 31: mod_base = OTHER; note = 2'-O-methyl ribonucleotide
  modified_base 32: mod_base = OTHER; note = 2'-O-methyl ribonucleotide
  modified_base 34: mod_base = OTHER; note = 2'-O-methyl ribonucleotide
  modified_base 35: mod_base = OTHER; note = 2'-O-methyl ribonucleotide
  modified_base 36: mod_base = OTHER; note = 2'-O-methyl ribonucleotide
  modified_base 37: mod_base = OTHER; note = 2'-O-methyl ribonucleotide
  modified_base 38: mod_base = OTHER; note = 2'-O-methyl ribonucleotide
  modified_base 39: mod_base = OTHER; note = 2'-O-methyl ribonucleotide
  modified_base 40: mod_base = OTHER; note = 2'-O-methyl ribonucleotide
  modified_base 41: mod_base = OTHER; note = 2'-O-methyl ribonucleotide
  modified_base 42: mod_base = OTHER; note = 2'-O-methyl ribonucleotide
  modified_base 46: mod_base = OTHER; note = 2'-O-methyl ribonucleotide
  modified_base 48: mod_base = OTHER; note = 2'-O-methyl ribonucleotide
  modified_base 50: mod_base = OTHER; note = 2'-O-methyl ribonucleotide
  modified_base 52: mod_base = OTHER; note = 2'-O-methyl ribonucleotide
  modified_base 53: mod_base = OTHER; note = 2'-O-methyl ribonucleotide
  modified_base 54: mod_base = OTHER; note = 2'-O-methyl ribonucleotide
  modified_base 55: mod_base = OTHER; note = 2'-O-methyl ribonucleotide
  modified_base 56: mod_base = OTHER; note = 2'-O-methyl ribonucleotide
  modified_base 57: mod_base = OTHER; note = 2'-O-methyl ribonucleotide
  modified_base 60: mod_base = OTHER; note = 2'-O-methyl ribonucleotide
  modified_base 61: mod_base = OTHER; note = 2'-O-methyl ribonucleotide
  modified_base 66: mod_base = OTHER; note = 2'-O-methyl ribonucleotide
  modified_base 67: mod_base = OTHER; note = 2'-O-methyl ribonucleotide
  modified_base 70: mod_base = OTHER; note = 2'-O-methyl ribonucleotide
  modified_base 71: mod_base = OTHER; note = 2'-O-methyl ribonucleotide
  modified_base 72: mod_base = OTHER; note = 2'-O-methyl ribonucleotide
  modified_base 74: mod_base = OTHER; note = 2'-O-methyl ribonucleotide
  modified_base 75: mod_base = OTHER; note = 2'-O-methyl ribonucleotide
  modified_base 76: mod_base = OTHER; note = 2'-O-methyl ribonucleotide
  modified_base 77: mod_base = OTHER; note = 2'-O-methyl ribonucleotide
  modified_base 78: mod_base = OTHER; note = 2'-O-methyl ribonucleotide
  modified_base 79: mod_base = OTHER; note = 2'-O-methyl ribonucleotide
  modified_base 80: mod_base = OTHER; note = 2'-O-methyl ribonucleotide
  modified_base 82: mod_base = OTHER; note = 2'-O-methyl ribonucleotide
  modified_base 83: mod_base = OTHER; note = 2'-O-methyl ribonucleotide
  modified_base 84: mod_base = OTHER; note = 2'-O-methyl ribonucleotide
  modified_base 85: mod_base = OTHER; note = 2'-O-methyl ribonucleotide
  modified_base 86: mod_base = OTHER; note = 2'-O-methyl ribonucleotide
  modified_base 87: mod_base = OTHER; note = 2'-O-methyl ribonucleotide
  modified_base 89: mod_base = OTHER; note = 2'-O-methyl ribonucleotide
  modified_base 92: mod_base = OTHER; note = 2'-O-methyl ribonucleotide
  modified_base 93: mod_base = OTHER; note = 2'-O-methyl ribonucleotide
  modified_base 94: mod_base = OTHER; note = 2'-O-methyl ribonucleotide
  modified_base 95: mod_base = OTHER; note = 2'-O-methyl ribonucleotide
  modified_base 96: mod_base = OTHER; note = 2'-O-methyl ribonucleotide
  modified_base 97: mod_base = OTHER; note = 2'-O-methyl ribonucleotide
  modified_base 98: mod_base = OTHER; note = 2'-O-methyl ribonucleotide
  modified_base 99: mod_base = OTHER; note = 2'-O-methyl ribonucleotide
  modified_base 100: mod_base = OTHER; note = 2'-O-methyl ribonucleotide
  modified_base 101: mod_base = OTHER; note = uniform ribonucleotides (A, C, G, inosine or U), deoxynucleotides (A, G, C, inosine or T), ribonebularine, 2'-O-methylnebularine or deoxynebularine
  modified_base 102: mod_base = OTHER; note = uniform ribonucleotides (A, C, G, inosine or U), deoxynucleotides (A, G, C, inosine or T), ribonebularine, 2'-O-methylnebularine or deoxynebularine
  modified_base 103: mod_base = OTHER; note = uniform ribonucleotides (A, C, G, inosine or U), deoxynucleotides (A, G, C, inosine or T), ribonebularine, 2'-O-methylnebularine or deoxynebularine
  modified_base 1..3: mod_base = OTHER; note = phosphorothioate linkage
  modified_base 25..26: mod_base = OTHER; note = phosphorothioate linkage
  modified_base 45..46: mod_base = OTHER; note = phosphorothioate linkage
  modified_base 97..100: mod_base = OTHER; note = phosphorothioate linkage
  misc_feature 1..100: note = RNA
  misc_feature 101..103: note = Optionally DNA or RNA

SEQ ID NO: 2955 - DNA, 103 bp, synthetic construct; identical to SEQ ID NO: 1795
  source 1..103: mol_type = other DNA
  modified_base 1: mod_base = OTHER; note = 2'-O-methyl ribonucleotide
  modified_base 2: mod_base = OTHER; note = 2'-O-methyl ribonucleotide
  modified_base 3: mod_base = OTHER; note = 2'-O-methyl ribonucleotide
  modified_base 21: mod_base = OTHER; note = 2'-O-methyl ribonucleotide
  modified_base 28: mod_base = OTHER; note = 2'-O-methyl ribonucleotide
  modified_base 29: mod_base = OTHER; note = 2'-O-methyl ribonucleotide
  modified_base 30: mod_base = OTHER; note = 2'-O-methyl ribonucleotide
  modified_base 31: mod_base = OTHER; note = 2'-O-methyl ribonucleotide
  modified_base 32: mod_base = OTHER; note = 2'-O-methyl ribonucleotide
  modified_base 33: mod_base = OTHER; note = 2'-O-methyl ribonucleotide
  modified_base 34: mod_base = OTHER; note = 2'-O-methyl ribonucleotide
  modified_base 35: mod_base = OTHER; note = 2'-O-methyl ribonucleotide
  modified_base 36: mod_base = OTHER; note = 2'-O-methyl ribonucleotide
  modified_base 37: mod_base = OTHER; note = 2'-O-methyl ribonucleotide
  modified_base 38: mod_base = OTHER; note = 2'-O-methyl ribonucleotide
  modified_base 39: mod_base = OTHER; note = 2'-O-methyl ribonucleotide
  modified_base 40: mod_base = OTHER; note = 2'-O-methyl ribonucleotide
  modified_base 41: mod_base = OTHER; note = 2'-O-methyl ribonucleotide
  modified_base 42: mod_base = OTHER; note = 2'-O-methyl ribonucleotide
  modified_base 46: mod_base = OTHER; note = 2'-O-methyl ribonucleotide
  modified_base 48: mod_base = OTHER; note = 2'-O-methyl ribonucleotide
  modified_base 50: mod_base = OTHER; note = 2'-O-methyl ribonucleotide
  modified_base 52: mod_base = OTHER; note = 2'-O-methyl ribonucleotide
  modified_base 53: mod_base = OTHER; note = 2'-O-methyl ribonucleotide
  modified_base 54: mod_base = OTHER; note = 2'-O-methyl ribonucleotide
  modified_base 55: mod_base = OTHER; note = 2'-O-methyl ribonucleotide
  modified_base 56: mod_base = OTHER; note = 2'-O-methyl ribonucleotide
  modified_base 57: mod_base = OTHER; note = 2'-O-methyl ribonucleotide
  modified_base 60: mod_base = OTHER; note = 2'-O-methyl ribonucleotide
  modified_base 61: mod_base = OTHER; note = 2'-O-methyl ribonucleotide
  modified_base 66: mod_base = OTHER; note = 2'-O-methyl ribonucleotide
  modified_base 67: mod_base = OTHER; note = 2'-O-methyl ribonucleotide
  modified_base 70: mod_base = OTHER; note = 2'-O-methyl ribonucleotide
  modified_base 71: mod_base = OTHER; note = 2'-O-methyl ribonucleotide
  modified_base 72: mod_base = OTHER; note = 2'-O-methyl ribonucleotide
  modified_base 73: mod_base = OTHER; note = 2'-O-methyl ribonucleotide
  modified_base 74: mod_base = OTHER; note = 2'-O-methyl ribonucleotide
  modified_base 75: mod_base = OTHER; note = 2'-O-methyl ribonucleotide
  modified_base 76: mod_base = OTHER; note = 2'-O-methyl ribonucleotide
  modified_base 77: mod_base = OTHER; note = 2'-O-methyl ribonucleotide
  modified_base 78: mod_base = OTHER; note = 2'-O-methyl ribonucleotide
  modified_base 79: mod_base = OTHER; note = 2'-O-methyl ribonucleotide
  modified_base 80: mod_base = OTHER; note = 2'-O-methyl ribonucleotide
  modified_base 81: mod_base = OTHER; note = 2'-O-methyl ribonucleotide
  modified_base 83: mod_base = OTHER; note = 2'-O-methyl ribonucleotide
  modified_base 84: mod_base = OTHER; note = 2'-O-methyl ribonucleotide
  modified_base 85: mod_base = OTHER; note = 2'-O-methyl ribonucleotide
  modified_base 86: mod_base = OTHER; note = 2'-O-methyl ribonucleotide
  modified_base 87: mod_base = OTHER; note = 2'-O-methyl ribonucleotide
  modified_base 88: mod_base = OTHER; note = 2'-O-methyl ribonucleotide
  modified_base 89: mod_base = OTHER; note = 2'-O-methyl ribonucleotide
  modified_base 90: mod_base = OTHER; note = 2'-O-methyl ribonucleotide
  modified_base 91: mod_base = OTHER; note = 2'-O-methyl ribonucleotide
  modified_base 92: mod_base = OTHER; note = 2'-O-methyl ribonucleotide
  modified_base 93: mod_base = OTHER; note = 2'-O-methyl ribonucleotide
  modified_base 94: mod_base = OTHER; note = 2'-O-methyl ribonucleotide
  modified_base 95: mod_base = OTHER; note = 2'-O-methyl ribonucleotide
  modified_base 96: mod_base = OTHER; note = 2'-O-methyl ribonucleotide
  modified_base 97: mod_base = OTHER; note = 2'-O-methyl ribonucleotide
  modified_base 98: mod_base = OTHER; note = 2'-O-methyl ribonucleotide
  modified_base 99: mod_base = OTHER; note = 2'-O-methyl ribonucleotide
  modified_base 100: mod_base = OTHER; note = 2'-O-methyl ribonucleotide
  modified_base 101: mod_base = OTHER; note = uniform ribonucleotides (A, C, G, inosine or U), deoxynucleotides (A, G, C, inosine or T), ribonebularine, 2'-O-methylnebularine or deoxynebularine
  modified_base 102: mod_base = OTHER; note = uniform ribonucleotides (A, C, G, inosine or U), deoxynucleotides (A, G, C, inosine or T), ribonebularine, 2'-O-methylnebularine or deoxynebularine
  modified_base 103: mod_base = OTHER; note = uniform ribonucleotides (A, C, G, inosine or U), deoxynucleotides (A, G, C, inosine or T), ribonebularine, 2'-O-methylnebularine or deoxynebularine
  modified_base 1..3: mod_base = OTHER; note = phosphorothioate linkage
  modified_base 25..26: mod_base = OTHER; note = phosphorothioate linkage
  modified_base 64..65: mod_base = OTHER; note = phosphorothioate linkage
  modified_base 97..100: mod_base = OTHER; note = phosphorothioate linkage
  misc_feature 1..100: note = RNA
  misc_feature 101..103: note = Optionally DNA or RNA

SEQ ID NO: 2956 - DNA, 103 bp, synthetic construct; identical to SEQ ID NO: 1795
  source 1..103: mol_type = other DNA
  modified_base 1: mod_base = OTHER; note = 2'-O-methyl ribonucleotide
  modified_base 2: mod_base = OTHER; note = 2'-O-methyl ribonucleotide
  modified_base 3: mod_base = OTHER; note = 2'-O-methyl ribonucleotide
  modified_base 21: mod_base = OTHER; note = 2'-O-methyl ribonucleotide
  modified_base 28: mod_base = OTHER; note = 2'-O-methyl ribonucleotide
  modified_base 29: mod_base = OTHER; note = 2'-O-methyl ribonucleotide
  modified_base 30: mod_base = OTHER; note = 2'-O-methyl ribonucleotide
  modified_base 31: mod_base = OTHER; note = 2'-O-methyl ribonucleotide
  modified_base 32: mod_base = OTHER; note = 2'-O-methyl ribonucleotide
  modified_base 34: mod_base = OTHER; note = 2'-O-methyl ribonucleotide
  modified_base 35: mod_base = OTHER; note = 2'-O-methyl ribonucleotide
  modified_base 36: mod_base = OTHER; note = 2'-O-methyl ribonucleotide
  modified_base 37: mod_base = OTHER; note = 2'-O-methyl ribonucleotide
  modified_base 38: mod_base = OTHER; note = 2'-O-methyl ribonucleotide
  modified_base 39: mod_base = OTHER; note = 2'-O-methyl ribonucleotide
  modified_base 40: mod_base = OTHER; note = 2'-O-methyl ribonucleotide
  modified_base 41: mod_base = OTHER; note = 2'-O-methyl ribonucleotide
  modified_base 42: mod_base = OTHER; note = 2'-O-methyl ribonucleotide
  modified_base 46: mod_base = OTHER; note = 2'-O-methyl ribonucleotide
  modified_base 48: mod_base = OTHER; note = 2'-O-methyl ribonucleotide
  modified_base 50: mod_base = OTHER; note = 2'-O-methyl ribonucleotide
  modified_base 52: mod_base = OTHER; note = 2'-O-methyl ribonucleotide
  modified_base 53: mod_base = OTHER; note = 2'-O-methyl ribonucleotide
  modified_base 54: mod_base = OTHER; note = 2'-O-methyl ribonucleotide
  modified_base 55: mod_base = OTHER; note = 2'-O-methyl ribonucleotide
  modified_base 56: mod_base = OTHER; note = 2'-O-methyl ribonucleotide
  modified_base 57: mod_base = OTHER; note = 2'-O-methyl ribonucleotide
  modified_base 60: mod_base = OTHER; note = 2'-O-methyl ribonucleotide
  modified_base 61: mod_base = OTHER; note = 2'-O-methyl ribonucleotide
  modified_base 66: mod_base = OTHER; note = 2'-O-methyl ribonucleotide
  modified_base 67: mod_base = OTHER; note = 2'-O-methyl ribonucleotide
  modified_base 70: mod_base = OTHER; note = 2'-O-methyl ribonucleotide
  modified_base 71: mod_base = OTHER; note = 2'-O-methyl ribonucleotide
  modified_base 72: mod_base = OTHER; note = 2'-O-methyl ribonucleotide
  modified_base 74: mod_base = OTHER; note = 2'-O-methyl ribonucleotide
  modified_base 75: mod_base = OTHER; note = 2'-O-methyl ribonucleotide
  modified_base 76: mod_base = OTHER; note = 2'-O-methyl ribonucleotide
  modified_base 77: mod_base = OTHER; note = 2'-O-methyl ribonucleotide
  modified_base 78: mod_base = OTHER; note = 2'-O-methyl ribonucleotide
  modified_base 79: mod_base = OTHER; note = 2'-O-methyl ribonucleotide
  modified_base 80: mod_base = OTHER; note = 2'-O-methyl ribonucleotide
  modified_base 81: mod_base = OTHER; note = 2'-O-methyl ribonucleotide
  modified_base 83: mod_base = OTHER; note = 2'-O-methyl ribonucleotide
  modified_base 84: mod_base = OTHER; note = 2'-O-methyl ribonucleotide
  modified_base 85: mod_base = OTHER; note = 2'-O-methyl ribonucleotide
  modified_base 86: mod_base = OTHER; note = 2'-O-methyl ribonucleotide
  modified_base 87: mod_base = OTHER; note = 2'-O-methyl ribonucleotide
  modified_base 88: mod_base = OTHER; note = 2'-O-methyl ribonucleotide
  modified_base 89: mod_base = OTHER; note = 2'-O-methyl ribonucleotide
  modified_base 90: mod_base = OTHER; note = 2'-O-methyl ribonucleotide
  modified_base 91: mod_base = OTHER; note = 2'-O-methyl ribonucleotide
  modified_base 92: mod_base = OTHER; note = 2'-O-methyl ribonucleotide
  modified_base 93: mod_base = OTHER; note = 2'-O-methyl ribonucleotide
  modified_base 94: mod_base = OTHER; note = 2'-O-methyl ribonucleotide
  modified_base 95: mod_base = OTHER; note = 2'-O-methyl ribonucleotide
  modified_base 96: mod_base = OTHER; note = 2'-O-methyl ribonucleotide
  modified_base 97: mod_base = OTHER; note = 2'-O-methyl ribonucleotide
  modified_base 98: mod_base = OTHER; note = 2'-O-methyl ribonucleotide
  modified_base 99: mod_base = OTHER; note = 2'-O-methyl ribonucleotide
  modified_base 100: mod_base = OTHER; note = 2'-O-methyl ribonucleotide
  modified_base 101: mod_base = OTHER; note = uniform ribonucleotides (A, C, G, inosine or U), deoxynucleotides (A, G, C, inosine or T), ribonebularine, 2'-O-methylnebularine or deoxynebularine
  modified_base 102: mod_base = OTHER; note = uniform ribonucleotides (A, C, G, inosine or U), deoxynucleotides (A, G, C, inosine or T), ribonebularine, 2'-O-methylnebularine or deoxynebularine
  modified_base 103: mod_base = OTHER; note = uniform ribonucleotides (A, C, G, inosine or U), deoxynucleotides (A, G, C, inosine or T), ribonebularine, 2'-O-methylnebularine or deoxynebularine
  modified_base 1..3: mod_base = OTHER; note = phosphorothioate linkage
  modified_base 25..26: mod_base = OTHER; note = phosphorothioate linkage
  modified_base 64..65: mod_base = OTHER; note = phosphorothioate linkage
  modified_base 97..100: mod_base = OTHER; note = phosphorothioate linkage
  misc_feature 1..100: note = RNA
  misc_feature 101..103: note = Optionally DNA or RNA

SEQ ID NO: 2957 - DNA, 103 bp, synthetic construct; identical to SEQ ID NO: 1796
  source 1..103: mol_type = other DNA
  modified_base 1: mod_base = OTHER; note = 2'-O-methyl ribonucleotide
  modified_base 2: mod_base = OTHER; note = 2'-O-methyl ribonucleotide
  modified_base 3: mod_base = OTHER; note = 2'-O-methyl ribonucleotide
  modified_base 21: mod_base = OTHER; note = 2'-O-methyl ribonucleotide
  modified_base 28: mod_base = OTHER; note = 2'-O-methyl ribonucleotide
  modified_base 29: mod_base = OTHER; note = 2'-O-methyl ribonucleotide
  modified_base 30: mod_base = OTHER; note = 2'-O-methyl ribonucleotide
  modified_base 31: mod_base = OTHER; note = 2'-O-methyl ribonucleotide
  modified_base 32: mod_base = OTHER; note = 2'-O-methyl ribonucleotide
  modified_base 33: mod_base = OTHER; note = 2'-O-methyl ribonucleotide
  modified_base 34: mod_base = OTHER; note = 2'-O-methyl ribonucleotide
  modified_base 35: mod_base = OTHER; note = 2'-O-methyl ribonucleotide
  modified_base 36: mod_base = OTHER; note = 2'-O-methyl ribonucleotide
  modified_base 37: mod_base = OTHER; note = 2'-O-methyl ribonucleotide
  modified_base 38: mod_base = OTHER; note = 2'-O-methyl ribonucleotide
  modified_base 39: mod_base = OTHER; note = 2'-O-methyl ribonucleotide
  modified_base 40: mod_base = OTHER; note = 2'-O-methyl ribonucleotide
  modified_base 41: mod_base = OTHER; note = 2'-O-methyl ribonucleotide
  modified_base 42: mod_base = OTHER; note = 2'-O-methyl ribonucleotide
  modified_base 46: mod_base = OTHER; note = 2'-O-methyl ribonucleotide
  modified_base 48: mod_base = OTHER; note = 2'-O-methyl ribonucleotide
  modified_base 50: mod_base = OTHER; note = 2'-O-methyl ribonucleotide
  modified_base 52: mod_base = OTHER; note = 2'-O-methyl ribonucleotide
  modified_base 53: mod_base = OTHER; note = 2'-O-methyl ribonucleotide
  modified_base 54: mod_base = OTHER; note = 2'-O-methyl ribonucleotide
  modified_base 55: mod_base = OTHER; note = 2'-O-methyl ribonucleotide
  modified_base 56: mod_base = OTHER; note = 2'-O-methyl ribonucleotide
  modified_base 57: mod_base = OTHER; note = 2'-O-methyl ribonucleotide
  modified_base 60: mod_base = OTHER; note = 2'-O-methyl ribonucleotide
  modified_base 61: mod_base = OTHER; note = 2'-O-methyl ribonucleotide
  modified_base 66: mod_base = OTHER; note = 2'-O-methyl ribonucleotide
  modified_base 67: mod_base = OTHER; note = 2'-O-methyl ribonucleotide
  modified_base 70: mod_base = OTHER; note = 2'-O-methyl ribonucleotide
  modified_base 71: mod_base = OTHER; note = 2'-O-methyl ribonucleotide
  modified_base 72: mod_base = OTHER; note = 2'-O-methyl ribonucleotide
  modified_base 73: mod_base = OTHER; note = 2'-O-methyl ribonucleotide
  modified_base 74: mod_base = OTHER; note = 2'-O-methyl ribonucleotide
  modified_base 75: mod_base = OTHER; note = 2'-O-methyl ribonucleotide
  modified_base 76: mod_base = OTHER; note = 2'-O-methyl ribonucleotide
  modified_base 77: mod_base = OTHER; note = 2'-O-methyl ribonucleotide
  modified_base 78: mod_base = OTHER; note = 2'-O-methyl ribonucleotide
  modified_base 79: mod_base = OTHER; note = 2'-O-methyl ribonucleotide
  modified_base 80: mod_base = OTHER; note = 2'-O-methyl ribonucleotide
  modified_base 81: mod_base = OTHER; note = 2'-O-methyl ribonucleotide
  modified_base 83: mod_base = OTHER; note = 2'-O-methyl ribonucleotide
  modified_base 84: mod_base = OTHER; note = 2'-O-methyl ribonucleotide
  modified_base 85: mod_base = OTHER; note = 2'-O-methyl ribonucleotide
  modified_base 86: mod_base = OTHER; note = 2'-O-methyl ribonucleotide
  modified_base 87: mod_base = OTHER; note = 2'-O-methyl ribonucleotide
  modified_base 88: mod_base = OTHER; note = 2'-O-methyl ribonucleotide
  modified_base 89: mod_base = OTHER; note = 2'-O-methyl ribonucleotide
  modified_base 90: mod_base = OTHER; note = 2'-O-methyl ribonucleotide
  modified_base 91: mod_base = OTHER; note = 2'-O-methyl ribonucleotide
  modified_base 92: mod_base = OTHER; note = 2'-O-methyl ribonucleotide
  modified_base 93: mod_base = OTHER; note = 2'-O-methyl ribonucleotide
  modified_base 94: mod_base = OTHER; note = 2'-O-methyl ribonucleotide
  modified_base 95: mod_base = OTHER; note = 2'-O-methyl ribonucleotide
  modified_base 96: mod_base = OTHER; note = 2'-O-methyl ribonucleotide
  modified_base 97: mod_base = OTHER; note = 2'-O-methyl ribonucleotide
  modified_base 98: mod_base = OTHER; note = 2'-O-methyl ribonucleotide
  modified_base 99: mod_base = OTHER; note = 2'-O-methyl ribonucleotide
  modified_base 100: mod_base = OTHER; note = 2'-O-methyl ribonucleotide
  modified_base 101: mod_base = OTHER; note = uniform ribonucleotides (A, C, G, inosine or U), deoxynucleotides (A, G, C, inosine or T), ribonebularine, 2'-O-methylnebularine or deoxynebularine
  modified_base 102: mod_base = OTHER; note = uniform ribonucleotides (A, C, G, inosine or U), deoxynucleotides (A, G, C, inosine or T), ribonebularine, 2'-O-methylnebularine or deoxynebularine
  modified_base 103: mod_base = OTHER; note = uniform ribonucleotides (A, C, G, inosine or U), deoxynucleotides (A, G, C, inosine or T), ribonebularine, 2'-O-methylnebularine or deoxynebularine
  modified_base 1..3: mod_base = OTHER; note = phosphorothioate linkage
  modified_base 25..26: mod_base = OTHER; note = phosphorothioate linkage
  modified_base 64..65: mod_base = OTHER; note = phosphorothioate linkage
  modified_base 97..100: mod_base = OTHER; note = phosphorothioate linkage
  misc_feature 1..100: note = RNA
  misc_feature 101..103: note = Optionally DNA or RNA

SEQ ID NO: 2958 - DNA, 103 bp, synthetic construct; identical to SEQ ID NO: 1796
  source 1..103: mol_type = other DNA
  modified_base 1: mod_base = OTHER; note = 2'-O-methyl ribonucleotide
  modified_base 2: mod_base = OTHER; note = 2'-O-methyl ribonucleotide
  modified_base 3: mod_base = OTHER; note = 2'-O-methyl ribonucleotide
  modified_base 21: mod_base = OTHER; note = 2'-O-methyl ribonucleotide
  modified_base 28: mod_base = OTHER; note = 2'-O-methyl ribonucleotide
  modified_base 29: mod_base = OTHER; note = 2'-O-methyl ribonucleotide
  modified_base 30: mod_base = OTHER; note = 2'-O-methyl ribonucleotide
  modified_base 31: mod_base = OTHER; note = 2'-O-methyl ribonucleotide
  modified_base 32: mod_base = OTHER; note = 2'-O-methyl ribonucleotide
  modified_base 34: mod_base = OTHER; note = 2'-O-methyl ribonucleotide
  modified_base 35: mod_base = OTHER; note = 2'-O-methyl ribonucleotide
  modified_base 36: mod_base = OTHER; note = 2'-O-methyl ribonucleotide
  modified_base 37: mod_base = OTHER; note = 2'-O-methyl ribonucleotide
  modified_base 38: mod_base = OTHER; note = 2'-O-methyl ribonucleotide
  modified_base 39: mod_base = OTHER; note = 2'-O-methyl ribonucleotide
  modified_base 40: mod_base = OTHER; note = 2'-O-methyl ribonucleotide
  modified_base 41: mod_base = OTHER; note = 2'-O-methyl ribonucleotide
  modified_base 42: mod_base = OTHER; note = 2'-O-methyl ribonucleotide
  modified_base 46: mod_base = OTHER; note = 2'-O-methyl ribonucleotide
  modified_base 48: mod_base = OTHER; note = 2'-O-methyl ribonucleotide
  modified_base 50: mod_base = OTHER; note = 2'-O-methyl ribonucleotide
  modified_base 52: mod_base = OTHER; note = 2'-O-methyl ribonucleotide
  modified_base 53: mod_base = OTHER; note = 2'-O-methyl ribonucleotide
  modified_base 54: mod_base = OTHER; note = 2'-O-methyl ribonucleotide
  modified_base 55: mod_base = OTHER; note = 2'-O-methyl ribonucleotide
  modified_base 56: mod_base = OTHER; note = 2'-O-methyl ribonucleotide
  modified_base 57: mod_base = OTHER; note = 2'-O-methyl ribonucleotide
  modified_base 60: mod_base = OTHER; note = 2'-O-methyl ribonucleotide
  modified_base 61: mod_base = OTHER; note = 2'-O-methyl ribonucleotide
  modified_base 66: mod_base = OTHER; note = 2'-O-methyl ribonucleotide
  modified_base 67: mod_base = OTHER; note = 2'-O-methyl ribonucleotide
  modified_base 70: mod_base = OTHER; note = 2'-O-methyl ribonucleotide
  modified_base 71: mod_base = OTHER; note = 2'-O-methyl ribonucleotide
  modified_base 72: mod_base = OTHER; note = 2'-O-methyl ribonucleotide
  modified_base 74: mod_base = OTHER; note = 2'-O-methyl ribonucleotide
  modified_base 75: mod_base = OTHER; note = 2'-O-methyl ribonucleotide
  modified_base 76: mod_base = OTHER; note = 2'-O-methyl ribonucleotide
  modified_base 77: mod_base = OTHER; note = 2'-O-methyl ribonucleotide
  modified_base 78: mod_base = OTHER; note = 2'-O-methyl ribonucleotide
  modified_base 79: mod_base = OTHER; note = 2'-O-methyl ribonucleotide
  modified_base 80: mod_base = OTHER; note = 2'-O-methyl ribonucleotide
  modified_base 81: mod_base = OTHER; note = 2'-O-methyl ribonucleotide
  modified_base 83: mod_base = OTHER; note = 2'-O-methyl ribonucleotide
  modified_base 84: mod_base = OTHER; note = 2'-O-methyl ribonucleotide
  modified_base 85: mod_base = OTHER; note = 2'-O-methyl ribonucleotide
  modified_base 86: mod_base = OTHER; note = 2'-O-methyl ribonucleotide
  modified_base 87: mod_base = OTHER; note = 2'-O-methyl ribonucleotide
  modified_base 88: mod_base = OTHER; note = 2'-O-methyl ribonucleotide
  modified_base 89: mod_base = OTHER; note = 2'-O-methyl ribonucleotide
  modified_base 90: mod_base = OTHER; note = 2'-O-methyl ribonucleotide
  modified_base 91: mod_base = OTHER; note = 2'-O-methyl ribonucleotide
  modified_base 92: mod_base = OTHER; note = 2'-O-methyl ribonucleotide
  modified_base 93: mod_base = OTHER; note = 2'-O-methyl ribonucleotide
  modified_base 94: mod_base = OTHER; note = 2'-O-methyl ribonucleotide
  modified_base 95: mod_base = OTHER; note = 2'-O-methyl ribonucleotide
  modified_base 96: mod_base = OTHER; note = 2'-O-methyl ribonucleotide
  modified_base 97: mod_base = OTHER; note = 2'-O-methyl ribonucleotide
  modified_base 98: mod_base = OTHER; note = 2'-O-methyl ribonucleotide
  modified_base 99: mod_base = OTHER; note = 2'-O-methyl ribonucleotide
  modified_base 100: mod_base = OTHER; note = 2'-O-methyl ribonucleotide
  modified_base 101: mod_base = OTHER; note = uniform ribonucleotides (A, C, G, inosine or U), deoxynucleotides (A, G, C, inosine or T), ribonebularine, 2'-O-methylnebularine or deoxynebularine
  modified_base 102: mod_base = OTHER; note = uniform ribonucleotides (A, C, G, inosine or U), deoxynucleotides (A, G, C, inosine or T), ribonebularine, 2'-O-methylnebularine or deoxynebularine
  modified_base 103: mod_base = OTHER; note = uniform ribonucleotides (A, C, G, inosine or U), deoxynucleotides (A, G, C, inosine or T), ribonebularine, 2'-O-methylnebularine or deoxynebularine
  modified_base 1..3: mod_base = OTHER; note = phosphorothioate linkage
  modified_base 25..26: mod_base = OTHER; note = phosphorothioate linkage
  modified_base 64..65: mod_base = OTHER; note = phosphorothioate linkage
  modified_base 97..100: mod_base = OTHER; note = phosphorothioate linkage
  misc_feature 1..100: note = RNA
  misc_feature 101..103: note = Optionally DNA or RNA

SEQ ID NO: 2959 - DNA, 103 bp, synthetic construct; identical to SEQ ID NO: 1797
  source 1..103: mol_type = other DNA
  modified_base 1: mod_base = OTHER; note = 2'-O-methyl ribonucleotide
  modified_base 2: mod_base = OTHER; note = 2'-O-methyl ribonucleotide
  modified_base 3: mod_base = OTHER; note = 2'-O-methyl ribonucleotide
  modified_base 21: mod_base = OTHER; note = 2'-O-methyl ribonucleotide
  modified_base 28: mod_base = OTHER; note = 2'-O-methyl ribonucleotide
  modified_base 29: mod_base = OTHER; note = 2'-O-methyl ribonucleotide
  modified_base 30: mod_base = OTHER; note = 2'-O-methyl ribonucleotide
  modified_base 31: mod_base = OTHER; note = 2'-O-methyl ribonucleotide
  modified_base 32: mod_base = OTHER; note = 2'-O-methyl ribonucleotide
  modified_base 33: mod_base = OTHER; note = 2'-O-methyl ribonucleotide
  modified_base 34: mod_base = OTHER; note = 2'-O-methyl ribonucleotide
  modified_base 35: mod_base = OTHER; note = 2'-O-methyl ribonucleotide
  modified_base 36: mod_base = OTHER; note = 2'-O-methyl ribonucleotide
  modified_base 37: mod_base = OTHER; note = 2'-O-methyl ribonucleotide
  modified_base 38: mod_base = OTHER; note = 2'-O-methyl ribonucleotide
  modified_base 39: mod_base = OTHER; note = 2'-O-methyl ribonucleotide
  modified_base 40: mod_base = OTHER; note = 2'-O-methyl ribonucleotide
  modified_base 41: mod_base = OTHER; note = 2'-O-methyl ribonucleotide
  modified_base 42: mod_base = OTHER; note = 2'-O-methyl ribonucleotide
  modified_base 46: mod_base = OTHER; note = 2'-O-methyl ribonucleotide
  modified_base 48: mod_base = OTHER; note = 2'-O-methyl ribonucleotide
  modified_base 50: mod_base = OTHER; note = 2'-O-methyl ribonucleotide
  modified_base 52: mod_base = OTHER; note = 2'-O-methyl ribonucleotide
  modified_base 53: mod_base = OTHER; note = 2'-O-methyl ribonucleotide
  modified_base 54: mod_base = OTHER; note = 2'-O-methyl ribonucleotide
  modified_base 57: mod_base = OTHER; note = 2'-O-methyl ribonucleotide
  modified_base 61: mod_base = OTHER; note = 2'-O-methyl ribonucleotide
  modified_base 66: mod_base = OTHER; note = 2'-O-methyl ribonucleotide
  modified_base 67: mod_base = OTHER; note = 2'-O-methyl ribonucleotide
  modified_base 70: mod_base = OTHER; note = 2'-O-methyl ribonucleotide
  modified_base 71: mod_base = OTHER; note = 2'-O-methyl ribonucleotide
  modified_base 72: mod_base = OTHER; note = 2'-O-methyl ribonucleotide
  modified_base 74: mod_base = OTHER; note = 2'-O-methyl ribonucleotide
  modified_base 75: mod_base = OTHER; note = 2'-O-methyl ribonucleotide
  modified_base 76: mod_base = OTHER; note = 2'-O-methyl ribonucleotide
  modified_base 77: mod_base = OTHER; note = 2'-O-methyl ribonucleotide
  modified_base 78: mod_base = OTHER; note = 2'-O-methyl ribonucleotide
  modified_base 79: mod_base = OTHER; note = 2'-O-methyl ribonucleotide
  modified_base 80: mod_base = OTHER; note = 2'-O-methyl ribonucleotide
  modified_base 82: mod_base = OTHER; note = 2'-O-methyl ribonucleotide
  modified_base 83: mod_base = OTHER; note = 2'-O-methyl ribonucleotide
  modified_base 84: mod_base = OTHER; note = 2'-O-methyl ribonucleotide
  modified_base 85: mod_base = OTHER; note = 2'-O-methyl ribonucleotide
  modified_base 86: mod_base = OTHER; note = 2'-O-methyl ribonucleotide
  modified_base 87: mod_base = OTHER; note = 2'-O-methyl ribonucleotide
  modified_base 89: mod_base = OTHER; note = 2'-O-methyl ribonucleotide
  modified_base 92: mod_base = OTHER; note = 2'-O-methyl ribonucleotide
  modified_base 93: mod_base = OTHER; note = 2'-O-methyl ribonucleotide
  modified_base 94: mod_base = OTHER; note = 2'-O-methyl ribonucleotide
  modified_base 95: mod_base = OTHER; note = 2'-O-methyl ribonucleotide
  modified_base 96: mod_base = OTHER; note = 2'-O-methyl ribonucleotide
  modified_base 97: mod_base = OTHER; note = 2'-O-methyl ribonucleotide
  modified_base 98: mod_base = OTHER; note = 2'-O-methyl ribonucleotide
  modified_base 99: mod_base = OTHER; note = 2'-O-methyl ribonucleotide
  modified_base 100: mod_base = OTHER; note = 2'-O-methyl ribonucleotide
  modified_base 101: mod_base = OTHER; note = uniform ribonucleotides (A, C, G, inosine or U), deoxynucleotides (A, G, C, inosine or T), ribonebularine, 2'-O-methylnebularine or deoxynebularine
  modified_base 102: mod_base = OTHER; note = uniform ribonucleotides (A, C, G, inosine or U), deoxynucleotides (A, G, C, inosine or T), ribonebularine, 2'-O-methylnebularine or deoxynebularine
  modified_base 103: mod_base = OTHER; note = uniform ribonucleotides (A, C, G, inosine or U), deoxynucleotides (A, G, C, inosine or T), ribonebularine, 2'-O-methylnebularine or deoxynebularine
  modified_base 1..3: mod_base = OTHER; note = phosphorothioate linkage
  modified_base 25..26: mod_base = OTHER; note = phosphorothioate linkage
  modified_base 64..65: mod_base = OTHER; note = phosphorothioate linkage
  modified_base 97..100: mod_base = OTHER; note = phosphorothioate linkage
  misc_feature 1..100: note = RNA
  misc_feature 101..103: note = Optionally DNA or RNA

SEQ ID NO: 2960 - DNA, 103 bp, synthetic construct; identical to SEQ ID NO: 1797
  source 1..103: mol_type = other DNA
  modified_base 1: mod_base = OTHER; note = 2'-O-methyl ribonucleotide
  modified_base 2: mod_base = OTHER; note = 2'-O-methyl ribonucleotide
  modified_base 3: mod_base = OTHER; note = 2'-O-methyl ribonucleotide
  modified_base 21: mod_base = OTHER; note = 2'-O-methyl ribonucleotide
  modified_base 28: mod_base = OTHER; note = 2'-O-methyl ribonucleotide
  modified_base 29: mod_base = OTHER; note = 2'-O-methyl ribonucleotide
  modified_base 30: mod_base = OTHER; note = 2'-O-methyl ribonucleotide
  modified_base 31: mod_base = OTHER; note = 2'-O-methyl ribonucleotide
  modified_base 32: mod_base = OTHER; note = 2'-O-methyl ribonucleotide
  modified_base 33: mod_base = OTHER; note = 2'-O-methyl ribonucleotide
  modified_base 34: mod_base = OTHER; note = 2'-O-methyl ribonucleotide
  modified_base 35: mod_base = OTHER; note = 2'-O-methyl ribonucleotide
  modified_base 36: mod_base = OTHER; note = 2'-O-methyl ribonucleotide
  modified_base 37: mod_base = OTHER; note = 2'-O-methyl ribonucleotide
  modified_base 38: mod_base = OTHER; note = 2'-O-methyl ribonucleotide
  modified_base 39: mod_base = OTHER; note = 2'-O-methyl ribonucleotide
  modified_base 40: mod_base = OTHER; note = 2'-O-methyl ribonucleotide
  modified_base 41: mod_base = OTHER; note = 2'-O-methyl ribonucleotide
  modified_base 42: mod_base = OTHER; note = 2'-O-methyl ribonucleotide
  modified_base 46: mod_base = OTHER; note = 2'-O-methyl ribonucleotide
  modified_base 48: mod_base = OTHER; note = 2'-O-methyl ribonucleotide
  modified_base 50: mod_base = OTHER; note = 2'-O-methyl ribonucleotide
  modified_base 52: mod_base = OTHER; note = 2'-O-methyl ribonucleotide
  modified_base 53: mod_base = OTHER; note = 2'-O-methyl ribonucleotide
  modified_base 54: mod_base = OTHER; note = 2'-O-methyl ribonucleotide
  modified_base 55: mod_base = OTHER; note = 2'-O-methyl ribonucleotide
  modified_base 56: mod_base = OTHER; note = 2'-O-methyl ribonucleotide
  modified_base 57: mod_base = OTHER; note = 2'-O-methyl ribonucleotide
  modified_base 60: mod_base = OTHER; note = 2'-O-methyl ribonucleotide
  modified_base 61: mod_base = OTHER; note = 2'-O-methyl ribonucleotide
  modified_base 66: mod_base = OTHER; note = 2'-O-methyl ribonucleotide
  modified_base 67: mod_base = OTHER; note = 2'-O-methyl ribonucleotide
  modified_base 70: mod_base = OTHER; note = 2'-O-methyl ribonucleotide
  modified_base 71: mod_base = OTHER; note = 2'-O-methyl ribonucleotide
  modified_base 72: mod_base = OTHER; note = 2'-O-methyl ribonucleotide
  modified_base 74: mod_base = OTHER; note = 2'-O-methyl ribonucleotide
  modified_base 75: mod_base = OTHER; note = 2'-O-methyl ribonucleotide
  modified_base 76: mod_base = OTHER; note = 2'-O-methyl ribonucleotide
  modified_base 77: mod_base = OTHER; note = 2'-O-methyl ribonucleotide
  modified_base 78: mod_base = OTHER; note = 2'-O-methyl ribonucleotide
  modified_base 79: mod_base = OTHER; note = 2'-O-methyl ribonucleotide
  modified_base 80: mod_base = OTHER; note = 2'-O-methyl ribonucleotide
  modified_base 82: mod_base = OTHER; note = 2'-O-methyl ribonucleotide
  modified_base 83: mod_base = OTHER; note = 2'-O-methyl ribonucleotide
  modified_base 84: mod_base = OTHER; note = 2'-O-methyl ribonucleotide
  modified_base 85: mod_base = OTHER; note = 2'-O-methyl ribonucleotide
  modified_base 86: mod_base = OTHER; note = 2'-O-methyl ribonucleotide
  modified_base 87: mod_base = OTHER; note = 2'-O-methyl ribonucleotide
  modified_base 89: mod_base = OTHER; note = 2'-O-methyl ribonucleotide
  modified_base 92: mod_base = OTHER; note = 2'-O-methyl ribonucleotide
  modified_base 93: mod_base = OTHER; note = 2'-O-methyl ribonucleotide
  modified_base 94: mod_base = OTHER; note = 2'-O-methyl ribonucleotide
  modified_base 95: mod_base = OTHER; note = 2'-O-methyl ribonucleotide
  modified_base 96: mod_base = OTHER; note = 2'-O-methyl ribonucleotide
  modified_base 97: mod_base = OTHER; note = 2'-O-methyl ribonucleotide
  modified_base 98: mod_base = OTHER; note = 2'-O-methyl ribonucleotide
  modified_base 99: mod_base = OTHER; note = 2'-O-methyl ribonucleotide
  modified_base 100: mod_base = OTHER; note = 2'-O-methyl ribonucleotide
  modified_base 101: mod_base = OTHER; note = uniform ribonucleotides (A, C, G, inosine or U), deoxynucleotides (A, G, C, inosine or T), ribonebularine, 2'-O-methylnebularine or deoxynebularine
  modified_base 102: mod_base = OTHER; note = uniform ribonucleotides (A, C, G, inosine or U), deoxynucleotides (A, G, C, inosine or T), ribonebularine, 2'-O-methylnebularine or deoxynebularine
  modified_base 103: mod_base = OTHER; note = uniform ribonucleotides (A, C, G, inosine or U), deoxynucleotides (A, G, C, inosine or T), ribonebularine, 2'-O-methylnebularine or deoxynebularine
  modified_base 1..3: mod_base = OTHER; note = phosphorothioate linkage
  modified_base 25..26: mod_base = OTHER; note = phosphorothioate linkage
  modified_base 64..65: mod_base = OTHER; note = phosphorothioate linkage
  modified_base 97..100: mod_base = OTHER; note = phosphorothioate linkage
  misc_feature 1..100: note = RNA
  misc_feature 101..103: note = Optionally DNA or RNA

SEQ ID NO: 2961 - DNA, 103 bp, synthetic construct; identical to SEQ ID NO: 1797
  source 1..103: mol_type = other DNA
  modified_base 1: mod_base = OTHER; note = 2'-O-methyl ribonucleotide
  modified_base 2: mod_base = OTHER; note = 2'-O-methyl ribonucleotide
  modified_base 3: mod_base = OTHER; note = 2'-O-methyl ribonucleotide
  modified_base 21: mod_base = OTHER; note = 2'-O-methyl ribonucleotide
  modified_base 28: mod_base = OTHER; note = 2'-O-methyl ribonucleotide
  modified_base 29: mod_base = OTHER; note = 2'-O-methyl ribonucleotide
  modified_base 30: mod_base = OTHER; note = 2'-O-methyl ribonucleotide
  modified_base 31: mod_base = OTHER; note = 2'-O-methyl ribonucleotide
  modified_base 32: mod_base = OTHER; note = 2'-O-methyl ribonucleotide
  modified_base 33: mod_base = OTHER; note = 2'-O-methyl ribonucleotide
  modified_base 34: mod_base = OTHER; note = 2'-O-methyl ribonucleotide
  modified_base 35: mod_base = OTHER; note = 2'-O-methyl ribonucleotide
  modified_base 36: mod_base = OTHER; note = 2'-O-methyl ribonucleotide
  modified_base 37: mod_base = OTHER; note = 2'-O-methyl ribonucleotide
  modified_base 38: mod_base = OTHER; note = 2'-O-methyl ribonucleotide
  modified_base 39: mod_base = OTHER; note = 2'-O-methyl ribonucleotide
  modified_base 40: mod_base = OTHER; note = 2'-O-methyl ribonucleotide
  modified_base 41: mod_base = OTHER; note = 2'-O-methyl ribonucleotide
  modified_base 42: mod_base = OTHER; note = 2'-O-methyl ribonucleotide
  modified_base 46: mod_base = OTHER; note = 2'-O-methyl ribonucleotide
  modified_base 48: mod_base = OTHER; note = 2'-O-methyl ribonucleotide
  modified_base 50: mod_base = OTHER; note = 2'-O-methyl ribonucleotide
  modified_base 52: mod_base = OTHER; note = 2'-O-methyl ribonucleotide
  modified_base 53: mod_base = OTHER; note = 2'-O-methyl ribonucleotide
  modified_base 54: mod_base = OTHER; note = 2'-O-methyl ribonucleotide
  modified_base 57: mod_base = OTHER; note = 2'-O-methyl ribonucleotide
  modified_base 61: mod_base = OTHER; note = 2'-O-methyl ribonucleotide
  modified_base 66: mod_base = OTHER; note = 2'-O-methyl ribonucleotide
  modified_base 67: mod_base = OTHER; note = 2'-O-methyl ribonucleotide
  modified_base 70: mod_base = OTHER; note = 2'-O-methyl ribonucleotide
  modified_base 71: mod_base = OTHER; note = 2'-O-methyl ribonucleotide
  modified_base 72: mod_base = OTHER; note = 2'-O-methyl ribonucleotide
  modified_base 73: mod_base = OTHER; note = 2'-O-methyl ribonucleotide
  modified_base 74: mod_base = OTHER; note = 2'-O-methyl ribonucleotide
  modified_base 75: mod_base = OTHER; note = 2'-O-methyl ribonucleotide
  modified_base 76: mod_base = OTHER; note = 2'-O-methyl ribonucleotide
  modified_base 77: mod_base = OTHER; note = 2'-O-methyl ribonucleotide
  modified_base 78: mod_base = OTHER; note = 2'-O-methyl ribonucleotide
  modified_base 79: mod_base = OTHER; note = 2'-O-methyl ribonucleotide
  modified_base 80: mod_base = OTHER; note = 2'-O-methyl ribonucleotide
  modified_base 82: mod_base = OTHER; note = 2'-O-methyl ribonucleotide
  modified_base 83: mod_base = OTHER; note = 2'-O-methyl ribonucleotide
  modified_base 84: mod_base = OTHER; note = 2'-O-methyl ribonucleotide
  modified_base 85: mod_base = OTHER; note = 2'-O-methyl ribonucleotide
  modified_base 86: mod_base = OTHER; note = 2'-O-methyl ribonucleotide
  modified_base 87: mod_base = OTHER; note = 2'-O-methyl ribonucleotide
  modified_base 89: mod_base = OTHER; note = 2'-O-methyl ribonucleotide
  modified_base 92: mod_base = OTHER; note = 2'-O-methyl ribonucleotide
  modified_base 93: mod_base = OTHER; note = 2'-O-methyl ribonucleotide
  modified_base 94: mod_base = OTHER; note = 2'-O-methyl ribonucleotide
  modified_base 95: mod_base = OTHER; note = 2'-O-methyl ribonucleotide
  modified_base 96: mod_base = OTHER; note = 2'-O-methyl ribonucleotide
  modified_base 97: mod_base = OTHER; note = 2'-O-methyl ribonucleotide
  modified_base 98: mod_base = OTHER; note = 2'-O-methyl ribonucleotide
  modified_base 99: mod_base = OTHER; note = 2'-O-methyl ribonucleotide
  modified_base 100: mod_base = OTHER; note = 2'-O-methyl ribonucleotide
  modified_base 101: mod_base = OTHER; note = uniform ribonucleotides (A, C, G, inosine or U), deoxynucleotides (A, G, C, inosine or T), ribonebularine, 2'-O-methylnebularine or deoxynebularine
  modified_base 102: mod_base = OTHER; note = uniform ribonucleotides (A, C, G, inosine or U), deoxynucleotides (A, G, C, inosine or T), ribonebularine, 2'-O-methylnebularine or deoxynebularine
  modified_base 103: mod_base = OTHER; note = uniform ribonucleotides (A, C, G, inosine or U), deoxynucleotides (A, G, C, inosine or T), ribonebularine, 2'-O-methylnebularine or deoxynebularine
  modified_base 1..3: mod_base = OTHER; note = phosphorothioate linkage
  modified_base 25..26: mod_base = OTHER; note = phosphorothioate linkage
  modified_base 64..65: mod_base = OTHER; note = phosphorothioate linkage
  modified_base 97..100: mod_base = OTHER; note = phosphorothioate linkage
  misc_feature 1..100: note = RNA
  misc_feature 101..103: note = Optionally DNA or RNA

SEQ ID NO: 2962 - DNA, 103 bp, synthetic construct; identical to SEQ ID NO: 1797
  source 1..103: mol_type = other DNA
  modified_base 1: mod_base = OTHER; note = 2'-O-methyl ribonucleotide
  modified_base 2: mod_base = OTHER; note = 2'-O-methyl ribonucleotide
  modified_base 3: mod_base = OTHER; note = 2'-O-methyl ribonucleotide
  modified_base 21: mod_base = OTHER; note = 2'-O-methyl ribonucleotide
  modified_base 28: mod_base = OTHER; note = 2'-O-methyl ribonucleotide
  modified_base 29: mod_base = OTHER; note = 2'-O-methyl ribonucleotide
  modified_base 30: mod_base = OTHER; note = 2'-O-methyl ribonucleotide
  modified_base 31: mod_base = OTHER; note = 2'-O-methyl ribonucleotide
  modified_base 32: mod_base = OTHER; note = 2'-O-methyl ribonucleotide
  modified_base 33: mod_base = OTHER; note = 2'-O-methyl ribonucleotide
  modified_base 34: mod_base = OTHER; note = 2'-O-methyl ribonucleotide
  modified_base 35: mod_base = OTHER; note = 2'-O-methyl ribonucleotide
  modified_base 36: mod_base = OTHER; note = 2'-O-methyl ribonucleotide
  modified_base 37: mod_base = OTHER; note = 2'-O-methyl ribonucleotide
  modified_base 38: mod_base = OTHER; note = 2'-O-methyl ribonucleotide
  modified_base 39: mod_base = OTHER; note = 2'-O-methyl ribonucleotide
  modified_base 40: mod_base = OTHER; note = 2'-O-methyl ribonucleotide
  modified_base 41: mod_base = OTHER; note = 2'-O-methyl ribonucleotide
  modified_base 42: mod_base = OTHER; note = 2'-O-methyl ribonucleotide
  modified_base 46: mod_base = OTHER; note = 2'-O-methyl ribonucleotide
  modified_base 48: mod_base = OTHER; note = 2'-O-methyl ribonucleotide
  modified_base 50: mod_base = OTHER; note = 2'-O-methyl ribonucleotide
  modified_base 52: mod_base = OTHER; note = 2'-O-methyl ribonucleotide
  modified_base 53: mod_base = OTHER; note = 2'-O-methyl ribonucleotide
  modified_base 54: mod_base = OTHER; note = 2'-O-methyl ribonucleotide
  modified_base 57: mod_base = OTHER; note = 2'-O-methyl ribonucleotide
  modified_base 61: mod_base = OTHER; note = 2'-O-methyl ribonucleotide
  modified_base 66: mod_base = OTHER; note = 2'-O-methyl ribonucleotide
  modified_base 67: mod_base = OTHER; note = 2'-O-methyl ribonucleotide
  modified_base 70: mod_base = OTHER; note = 2'-O-methyl ribonucleotide
  modified_base 71: mod_base = OTHER; note = 2'-O-methyl ribonucleotide
  modified_base 72: mod_base = OTHER; note = 2'-O-methyl ribonucleotide
  modified_base 73: mod_base = OTHER; note = 2'-O-methyl ribonucleotide
  modified_base 74: mod_base = OTHER; note = 2'-O-methyl ribonucleotide
  modified_base 75: mod_base = OTHER; note = 2'-O-methyl ribonucleotide
  modified_base 76: mod_base = OTHER; note = 2'-O-methyl ribonucleotide
  modified_base 77: mod_base = OTHER; note = 2'-O-methyl ribonucleotide
  modified_base 78: mod_base = OTHER; note = 2'-O-methyl ribonucleotide
  modified_base 79: mod_base = OTHER; note = 2'-O-methyl ribonucleotide
  modified_base 80: mod_base = OTHER; note = 2'-O-methyl ribonucleotide
  modified_base 82: mod_base = OTHER; note = 2'-O-methyl ribonucleotide
  modified_base 83: mod_base = OTHER; note = 2'-O-methyl ribonucleotide
  modified_base 84: mod_base = OTHER; note = 2'-O-methyl ribonucleotide
  modified_base 85: mod_base = OTHER; note = 2'-O-methyl ribonucleotide
  modified_base 86: mod_base = OTHER; note = 2'-O-methyl ribonucleotide
  modified_base 87: mod_base = OTHER; note = 2'-O-methyl ribonucleotide
  modified_base 89: mod_base = OTHER; note = 2'-O-methyl ribonucleotide
  modified_base 91: mod_base = OTHER; note = 2'-O-methyl ribonucleotide
  modified_base 92: mod_base = OTHER; note = 2'-O-methyl ribonucleotide
  modified_base 93: mod_base = OTHER; note = 2'-O-methyl ribonucleotide
  modified_base 94: mod_base = OTHER; note = 2'-O-methyl ribonucleotide
  modified_base 95: mod_base = OTHER; note = 2'-O-methyl ribonucleotide
  modified_base 96: mod_base = OTHER; note = 2'-O-methyl ribonucleotide
  modified_base 97: mod_base = OTHER; note = 2'-O-methyl ribonucleotide
  modified_base 98: mod_base = OTHER; note = 2'-O-methyl ribonucleotide
  modified_base 99: mod_base = OTHER; note = 2'-O-methyl ribonucleotide
  modified_base 100: mod_base = OTHER; note = 2'-O-methyl ribonucleotide
  modified_base 101: mod_base = OTHER; note = uniform ribonucleotides (A, C, G, inosine or U), deoxynucleotides (A, G, C, inosine or T), ribonebularine, 2'-O-methylnebularine or deoxynebularine
  modified_base 102: mod_base = OTHER; note = uniform ribonucleotides (A, C, G, inosine or U), deoxynucleotides (A, G, C, inosine or T), ribonebularine, 2'-O-methylnebularine or deoxynebularine
  modified_base 103: mod_base = OTHER; note = uniform ribonucleotides (A, C, G, inosine or U), deoxynucleotides (A, G, C, inosine or T), ribonebularine, 2'-O-methylnebularine or deoxynebularine
  modified_base 1..3: mod_base = OTHER; note = phosphorothioate linkage
  modified_base 25..26: mod_base = OTHER; note = phosphorothioate linkage
  modified_base 64..65: mod_base = OTHER; note = phosphorothioate linkage
  modified_base 97..100: mod_base = OTHER; note = phosphorothioate linkage
  misc_feature 1..100: note = RNA
  misc_feature 101..103: note = Optionally DNA or RNA

SEQ ID NO: 2963 - DNA, 103 bp, synthetic construct; identical to SEQ ID NO: 1797
  source 1..103: mol_type = other DNA
  modified_base 1: mod_base = OTHER; note = 2'-O-methyl ribonucleotide
  modified_base 2: mod_base = OTHER; note = 2'-O-methyl ribonucleotide
  modified_base 3: mod_base = OTHER; note = 2'-O-methyl ribonucleotide
  modified_base 21: mod_base = OTHER; note = 2'-O-methyl ribonucleotide
  modified_base 28: mod_base = OTHER; note = 2'-O-methyl ribonucleotide
  modified_base 29: mod_base = OTHER; note = 2'-O-methyl ribonucleotide
  modified_base 30: mod_base = OTHER; note = 2'-O-methyl ribonucleotide
  modified_base 31: mod_base = OTHER; note = 2'-O-methyl ribonucleotide
  modified_base 32: mod_base = OTHER; note = 2'-O-methyl ribonucleotide
  modified_base 34: mod_base = OTHER; note = 2'-O-methyl ribonucleotide
  modified_base 35: mod_base = OTHER; note = 2'-O-methyl ribonucleotide
  modified_base 36: mod_base = OTHER; note = 2'-O-methyl ribonucleotide
  modified_base 37: mod_base = OTHER; note = 2'-O-methyl ribonucleotide
  modified_base 38: mod_base = OTHER; note = 2'-O-methyl ribonucleotide
  modified_base 39: mod_base = OTHER; note = 2'-O-methyl ribonucleotide
  modified_base 40: mod_base = OTHER; note = 2'-O-methyl ribonucleotide
  modified_base 41: mod_base = OTHER; note = 2'-O-methyl ribonucleotide
  modified_base 42: mod_base = OTHER; note = 2'-O-methyl ribonucleotide
  modified_base 46: mod_base = OTHER; note = 2'-O-methyl ribonucleotide
  modified_base 48: mod_base = OTHER; note = 2'-O-methyl ribonucleotide
  modified_base 50: mod_base = OTHER; note = 2'-O-methyl ribonucleotide
  modified_base 52: mod_base = OTHER; note = 2'-O-methyl ribonucleotide
  modified_base 53: mod_base = OTHER; note = 2'-O-methyl ribonucleotide
  modified_base 54: mod_base = OTHER; note = 2'-O-methyl ribonucleotide
  modified_base 57: mod_base = OTHER; note = 2'-O-methyl ribonucleotide
  modified_base 61: mod_base = OTHER; note = 2'-O-methyl ribonucleotide
  modified_base 66: mod_base = OTHER; note = 2'-O-methyl ribonucleotide
  modified_base 67: mod_base = OTHER; note = 2'-O-methyl ribonucleotide
  modified_base 70: mod_base = OTHER; note = 2'-O-methyl ribonucleotide
  modified_base 71: mod_base = OTHER; note = 2'-O-methyl ribonucleotide
  modified_base 72: mod_base = OTHER; note = 2'-O-methyl ribonucleotide
  modified_base 73: mod_base = OTHER; note = 2'-O-methyl ribonucleotide
  modified_base 74: mod_base = OTHER; note = 2'-O-methyl ribonucleotide
  modified_base 75: mod_base = OTHER; note = 2'-O-methyl ribonucleotide
  modified_base 76: mod_base = OTHER; note = 2'-O-methyl ribonucleotide
  modified_base 77: mod_base = OTHER; note = 2'-O-methyl ribonucleotide
  modified_base 78: mod_base = OTHER; note = 2'-O-methyl ribonucleotide
  modified_base 79: mod_base = OTHER; note = 2'-O-methyl ribonucleotide
  modified_base 80: mod_base = OTHER; note = 2'-O-methyl ribonucleotide
  modified_base 82: mod_base = OTHER; note = 2'-O-methyl ribonucleotide
  modified_base 83: mod_base = OTHER; note = 2'-O-methyl ribonucleotide
  modified_base 84: mod_base = OTHER; note = 2'-O-methyl ribonucleotide
  modified_base 85: mod_base = OTHER; note = 2'-O-methyl ribonucleotide
  modified_base 86: mod_base = OTHER; note = 2'-O-methyl ribonucleotide
  modified_base 87: mod_base = OTHER; note = 2'-O-methyl ribonucleotide
  modified_base 89: mod_base = OTHER; note = 2'-O-methyl ribonucleotide
  modified_base 92: mod_base = OTHER; note = 2'-O-methyl ribonucleotide
  modified_base 93: mod_base = OTHER; note = 2'-O-methyl ribonucleotide
  modified_base 94: mod_base = OTHER; note = 2'-O-methyl ribonucleotide
  modified_base 95: mod_base = OTHER; note = 2'-O-methyl ribonucleotide
  modified_base 96: mod_base = OTHER; note = 2'-O-methyl ribonucleotide
  modified_base 97: mod_base = OTHER; note = 2'-O-methyl ribonucleotide
  modified_base 98: mod_base = OTHER; note = 2'-O-methyl ribonucleotide
  modified_base 99: mod_base = OTHER; note = 2'-O-methyl ribonucleotide
  modified_base 100: mod_base = OTHER; note = 2'-O-methyl ribonucleotide
  modified_base 101: mod_base = OTHER; note = uniform ribonucleotides (A, C, G, inosine or U), deoxynucleotides (A, G, C, inosine or T), ribonebularine, 2'-O-methylnebularine or deoxynebularine
  modified_base 102: mod_base = OTHER; note = uniform ribonucleotides (A, C, G, inosine or U), deoxynucleotides (A, G, C, inosine or T), ribonebularine, 2'-O-methylnebularine or deoxynebularine
  modified_base 103: mod_base = OTHER; note = uniform ribonucleotides (A, C, G, inosine or U), deoxynucleotides (A, G, C, inosine or T), ribonebularine, 2'-O-methylnebularine or deoxynebularine
  modified_base 1..3: mod_base = OTHER; note = phosphorothioate linkage
  modified_base 25..26: mod_base = OTHER; note = phosphorothioate linkage
  modified_base 64..65: mod_base = OTHER; note = phosphorothioate linkage
  modified_base 97..100: mod_base = OTHER; note = phosphorothioate linkage
  misc_feature 1..100: note = RNA
  misc_feature 101..103: note = Optionally DNA or RNA

SEQ ID NO: 2964 - DNA, 103 bp, synthetic construct; identical to SEQ ID NO: 1797
  source 1..103: mol_type = other DNA
  modified_base 1: mod_base = OTHER; note = 2'-O-methyl ribonucleotide
  modified_base 2: mod_base = OTHER; note = 2'-O-methyl ribonucleotide
  modified_base 3: mod_base = OTHER; note = 2'-O-methyl ribonucleotide
  modified_base 21: mod_base = OTHER; note = 2'-O-methyl ribonucleotide
  modified_base 28: mod_base = OTHER; note = 2'-O-methyl ribonucleotide
  modified_base 29: mod_base = OTHER; note = 2'-O-methyl ribonucleotide
  modified_base 30: mod_base = OTHER; note = 2'-O-methyl ribonucleotide
  modified_base 31: mod_base = OTHER; note = 2'-O-methyl ribonucleotide
  modified_base 32: mod_base = OTHER; note = 2'-O-methyl ribonucleotide
  modified_base 34: mod_base = OTHER; note = 2'-O-methyl ribonucleotide
  modified_base 35: mod_base = OTHER; note = 2'-O-methyl ribonucleotide
  modified_base 36: mod_base = OTHER; note = 2'-O-methyl ribonucleotide
  modified_base 37: mod_base = OTHER; note = 2'-O-methyl ribonucleotide
  modified_base 38: mod_base = OTHER; note = 2'-O-methyl ribonucleotide
  modified_base 39: mod_base = OTHER; note = 2'-O-methyl ribonucleotide
  modified_base 40: mod_base = OTHER; note = 2'-O-methyl ribonucleotide
  modified_base 41: mod_base = OTHER; note = 2'-O-methyl ribonucleotide
  modified_base 42: mod_base = OTHER; note = 2'-O-methyl ribonucleotide
  modified_base 46: mod_base = OTHER; note = 2'-O-methyl ribonucleotide
  modified_base 48: mod_base = OTHER; note = 2'-O-methyl ribonucleotide
  modified_base 50: mod_base = OTHER; note = 2'-O-methyl ribonucleotide
  modified_base 52: mod_base = OTHER; note = 2'-O-methyl ribonucleotide
  modified_base 53: mod_base = OTHER; note = 2'-O-methyl ribonucleotide
  modified_base 54: mod_base = OTHER; note = 2'-O-methyl ribonucleotide
  modified_base 57: mod_base = OTHER; note = 2'-O-methyl ribonucleotide
  modified_base 61: mod_base = OTHER; note = 2'-O-methyl ribonucleotide
  modified_base 66: mod_base = OTHER; note = 2'-O-methyl ribonucleotide
  modified_base 67: mod_base = OTHER; note = 2'-O-methyl ribonucleotide
  modified_base 70: mod_base = OTHER; note = 2'-O-methyl ribonucleotide
  modified_base 71: mod_base = OTHER; note = 2'-O-methyl ribonucleotide
  modified_base 72: mod_base = OTHER; note = 2'-O-methyl ribonucleotide
  modified_base 73: mod_base = OTHER; note = 2'-O-methyl ribonucleotide
  modified_base 74: mod_base = OTHER; note = 2'-O-methyl ribonucleotide
  modified_base 75: mod_base = OTHER; note = 2'-O-methyl ribonucleotide
  modified_base 76: mod_base = OTHER; note = 2'-O-methyl ribonucleotide
  modified_base 77: mod_base = OTHER; note = 2'-O-methyl ribonucleotide
  modified_base 78: mod_base = OTHER; note = 2'-O-methyl ribonucleotide
  modified_base 79: mod_base = OTHER; note = 2'-O-methyl ribonucleotide
  modified_base 80: mod_base = OTHER; note = 2'-O-methyl ribonucleotide
  modified_base 82: mod_base = OTHER; note = 2'-O-methyl ribonucleotide
  modified_base 83: mod_base = OTHER; note = 2'-O-methyl ribonucleotide
  modified_base 84: mod_base = OTHER; note = 2'-O-methyl ribonucleotide
  modified_base 85: mod_base = OTHER; note = 2'-O-methyl ribonucleotide
  modified_base 86: mod_base = OTHER; note = 2'-O-methyl ribonucleotide
  modified_base 87: mod_base = OTHER; note = 2'-O-methyl ribonucleotide
  modified_base 89: mod_base = OTHER; note = 2'-O-methyl ribonucleotide
  modified_base 91: mod_base = OTHER; note = 2'-O-methyl ribonucleotide
  modified_base 92: mod_base = OTHER; note = 2'-O-methyl ribonucleotide
  modified_base 93: mod_base = OTHER; note = 2'-O-methyl ribonucleotide
  modified_base 94: mod_base = OTHER; note = 2'-O-methyl ribonucleotide
  modified_base 95: mod_base = OTHER; note = 2'-O-methyl ribonucleotide
  modified_base 96: mod_base = OTHER; note = 2'-O-methyl ribonucleotide
  modified_base 97: mod_base = OTHER; note = 2'-O-methyl ribonucleotide
  modified_base 98: mod_base = OTHER; note = 2'-O-methyl ribonucleotide
  modified_base 99: mod_base = OTHER; note = 2'-O-methyl ribonucleotide
  modified_base 100: mod_base = OTHER; note = 2'-O-methyl ribonucleotide
  modified_base 101: mod_base = OTHER; note = uniform ribonucleotides (A, C, G, inosine or U), deoxynucleotides (A, G, C, inosine or T), ribonebularine, 2'-O-methylnebularine or deoxynebularine
  modified_base 102: mod_base = OTHER; note = uniform ribonucleotides (A, C, G, inosine or U), deoxynucleotides (A, G, C, inosine or T), ribonebularine, 2'-O-methylnebularine or deoxynebularine
  modified_base 103: mod_base = OTHER; note = uniform ribonucleotides (A, C, G, inosine or U), deoxynucleotides (A, G, C, inosine or T), ribonebularine, 2'-O-methylnebularine or deoxynebularine
  modified_base 1..3: mod_base = OTHER; note = phosphorothioate linkage
  modified_base 25..26: mod_base = OTHER; note = phosphorothioate linkage
  modified_base 64..65: mod_base = OTHER; note = phosphorothioate linkage
  modified_base 97..100: mod_base = OTHER; note = phosphorothioate linkage
  misc_feature 1..100: note = RNA
  misc_feature 101..103: note = Optionally DNA or RNA

SEQ ID NO: 2965 - DNA, 103 bp, synthetic construct; identical to SEQ ID NO: 1797
  source 1..103: mol_type = other DNA
  modified_base 1: mod_base = OTHER; note = 2'-O-methyl ribonucleotide
  modified_base 2: mod_base = OTHER; note = 2'-O-methyl ribonucleotide
  modified_base 3: mod_base = OTHER; note = 2'-O-methyl ribonucleotide
  modified_base 21: mod_base = OTHER; note = 2'-O-methyl ribonucleotide
  modified_base 28: mod_base = OTHER; note = 2'-O-methyl ribonucleotide
  modified_base 29: mod_base = OTHER; note = 2'-O-methyl ribonucleotide
  modified_base 30: mod_base = OTHER; note = 2'-O-methyl ribonucleotide
  modified_base 31: mod_base = OTHER; note = 2'-O-methyl ribonucleotide
  modified_base 32: mod_base = OTHER; note = 2'-O-methyl ribonucleotide
  modified_base 34: mod_base = OTHER; note = 2'-O-methyl ribonucleotide
  modified_base 35: mod_base = OTHER; note = 2'-O-methyl ribonucleotide
  modified_base 36: mod_base = OTHER; note = 2'-O-methyl ribonucleotide
  modified_base 37: mod_base = OTHER; note = 2'-O-methyl ribonucleotide
  modified_base 38: mod_base = OTHER; note = 2'-O-methyl ribonucleotide
  modified_base 39: mod_base = OTHER; note = 2'-O-methyl ribonucleotide
  modified_base 40: mod_base = OTHER; note = 2'-O-methyl ribonucleotide
  modified_base 41: mod_base = OTHER; note = 2'-O-methyl ribonucleotide
  modified_base 42: mod_base = OTHER; note = 2'-O-methyl ribonucleotide
  modified_base 46: mod_base = OTHER; note = 2'-O-methyl ribonucleotide
  modified_base 48: mod_base = OTHER; note = 2'-O-methyl ribonucleotide
  modified_base 50: mod_base = OTHER; note = 2'-O-methyl ribonucleotide
  modified_base 52: mod_base = OTHER; note = 2'-O-methyl ribonucleotide
  modified_base 53: mod_base = OTHER; note = 2'-O-methyl ribonucleotide
  modified_base 54: mod_base = OTHER; note = 2'-O-methyl ribonucleotide
  modified_base 55: mod_base = OTHER; note = 2'-O-methyl ribonucleotide
  modified_base 56: mod_base = OTHER; note = 2'-O-methyl ribonucleotide
  modified_base 57: mod_base = OTHER; note = 2'-O-methyl ribonucleotide
  modified_base 60: mod_base = OTHER; note = 2'-O-methyl ribonucleotide
  modified_base 61: mod_base = OTHER; note = 2'-O-methyl ribonucleotide
  modified_base 66: mod_base = OTHER; note = 2'-O-methyl ribonucleotide
  modified_base 67: mod_base = OTHER; note = 2'-O-methyl ribonucleotide
  modified_base 70: mod_base = OTHER; note = 2'-O-methyl ribonucleotide
  modified_base 71: mod_base = OTHER; note = 2'-O-methyl ribonucleotide
  modified_base 72: mod_base = OTHER; note = 2'-O-methyl ribonucleotide
  modified_base 74: mod_base = OTHER; note = 2'-O-methyl ribonucleotide
  modified_base 75: mod_base = OTHER; note = 2'-O-methyl ribonucleotide
  modified_base 76: mod_base = OTHER; note = 2'-O-methyl ribonucleotide
  modified_base 77: mod_base = OTHER; note = 2'-O-methyl ribonucleotide
  modified_base 78: mod_base = OTHER; note = 2'-O-methyl ribonucleotide
  modified_base 79: mod_base = OTHER; note = 2'-O-methyl ribonucleotide
  modified_base 80: mod_base = OTHER; note = 2'-O-methyl ribonucleotide
  modified_base 82: mod_base = OTHER; note = 2'-O-methyl ribonucleotide
  modified_base 83: mod_base = OTHER; note = 2'-O-methyl ribonucleotide
  modified_base 84: mod_base = OTHER; note = 2'-O-methyl ribonucleotide
  modified_base 85: mod_base = OTHER; note = 2'-O-methyl ribonucleotide
  modified_base 86: mod_base = OTHER; note = 2'-O-methyl ribonucleotide
  modified_base 87: mod_base = OTHER; note = 2'-O-methyl ribonucleotide
  modified_base 89: mod_base = OTHER; note = 2'-O-methyl ribonucleotide
  modified_base 92: mod_base = OTHER; note = 2'-O-methyl ribonucleotide
  modified_base 93: mod_base = OTHER; note = 2'-O-methyl ribonucleotide
  modified_base 94: mod_base = OTHER; note = 2'-O-methyl ribonucleotide
  modified_base 95: mod_base = OTHER; note = 2'-O-methyl ribonucleotide
  modified_base 96: mod_base = OTHER; note = 2'-O-methyl ribonucleotide
  modified_base 97: mod_base = OTHER; note = 2'-O-methyl ribonucleotide
  modified_base 98: mod_base = OTHER; note = 2'-O-methyl ribonucleotide
  modified_base 99: mod_base = OTHER; note = 2'-O-methyl ribonucleotide
  modified_base 100: mod_base = OTHER; note = 2'-O-methyl ribonucleotide
  modified_base 101: mod_base = OTHER; note = uniform ribonucleotides (A, C, G, inosine or U), deoxynucleotides (A, G, C, inosine or T), ribonebularine, 2'-O-methylnebularine or deoxynebularine
  modified_base 102: mod_base = OTHER; note = uniform ribonucleotides (A, C, G, inosine or U), deoxynucleotides (A, G, C, inosine or T), ribonebularine, 2'-O-methylnebularine or deoxynebularine
  modified_base 103: mod_base = OTHER; note = uniform ribonucleotides (A, C, G, inosine or U), deoxynucleotides (A, G, C, inosine or T), ribonebularine, 2'-O-methylnebularine or deoxynebularine
  modified_base 1..3: mod_base = OTHER; note = phosphorothioate linkage
  modified_base 25..26: mod_base = OTHER; note = phosphorothioate linkage
  modified_base 64..65: mod_base = OTHER; note = phosphorothioate linkage
  modified_base 97..100: mod_base = OTHER; note = phosphorothioate linkage
  misc_feature 1..100: note = RNA
  misc_feature 101..103: note = Optionally DNA or RNA

SEQ ID NO: 2966 - DNA, 103 bp, synthetic construct; identical to SEQ ID NO: 1795
  source 1..103: mol_type = other DNA
  modified_base 1: mod_base = OTHER; note = 2'-O-methyl ribonucleotide
  modified_base 2: mod_base = OTHER; note = 2'-O-methyl ribonucleotide
  modified_base 3: mod_base = OTHER; note = 2'-O-methyl ribonucleotide
  modified_base 21: mod_base = OTHER; note = 2'-O-methyl ribonucleotide
  modified_base 28: mod_base = OTHER; note = 2'-O-methyl ribonucleotide
  modified_base 29: mod_base = OTHER; note = 2'-O-methyl ribonucleotide
  modified_base 30: mod_base = OTHER; note = 2'-O-methyl ribonucleotide
  modified_base 31: mod_base = OTHER; note = 2'-O-methyl ribonucleotide
  modified_base 32: mod_base = OTHER; note = 2'-O-methyl ribonucleotide
  modified_base 33: mod_base = OTHER; note = 2'-O-methyl ribonucleotide
  modified_base 34: mod_base = OTHER; note = 2'-O-methyl ribonucleotide
  modified_base 35: mod_base = OTHER; note = 2'-O-methyl ribonucleotide
  modified_base 36: mod_base = OTHER; note = 2'-O-methyl ribonucleotide
  modified_base 37: mod_base = OTHER; note = 2'-O-methyl ribonucleotide
  modified_base 38: mod_base = OTHER; note = 2'-O-methyl ribonucleotide
  modified_base 39: mod_base = OTHER; note = 2'-O-methyl ribonucleotide
  modified_base 40: mod_base = OTHER; note = 2'-O-methyl ribonucleotide
  modified_base 41: mod_base = OTHER; note = 2'-O-methyl ribonucleotide
  modified_base 42: mod_base = OTHER; note = 2'-O-methyl ribonucleotide
  modified_base 46: mod_base = OTHER; note = 2'-O-methyl ribonucleotide
  modified_base 48: mod_base = OTHER; note = 2'-O-methyl ribonucleotide
  modified_base 50: mod_base = OTHER; note = 2'-O-methyl ribonucleotide
  modified_base 52: mod_base = OTHER; note = 2'-O-methyl ribonucleotide
  modified_base 53: mod_base = OTHER; note = 2'-O-methyl ribonucleotide
  modified_base 54: mod_base = OTHER; note = 2'-O-methyl ribonucleotide
  modified_base 55: mod_base = OTHER; note = 2'-O-methyl ribonucleotide
  modified_base 56: mod_base = OTHER; note = 2'-O-methyl ribonucleotide
  modified_base 57: mod_base = OTHER; note = 2'-O-methyl ribonucleotide
  modified_base 60: mod_base = OTHER; note = 2'-O-methyl ribonucleotide
  modified_base 61: mod_base = OTHER; note = 2'-O-methyl ribonucleotide
  modified_base 66: mod_base = OTHER; note = 2'-O-methyl ribonucleotide
  modified_base 67: mod_base = OTHER; note = 2'-O-methyl ribonucleotide
  modified_base 70: mod_base = OTHER; note = 2'-O-methyl ribonucleotide
  modified_base 71: mod_base = OTHER; note = 2'-O-methyl ribonucleotide
  modified_base 72: mod_base = OTHER; note = 2'-O-methyl ribonucleotide
  modified_base 73: mod_base = OTHER; note = 2'-O-methyl ribonucleotide
  modified_base 74: mod_base = OTHER; note = 2'-O-methyl ribonucleotide
  modified_base 75: mod_base = OTHER; note = 2'-O-methyl ribonucleotide
  modified_base 76: mod_base = OTHER; note = 2'-O-methyl ribonucleotide
  modified_base 77: mod_base = OTHER; note = 2'-O-methyl ribonucleotide
  modified_base 78: mod_base = OTHER; note = 2'-O-methyl ribonucleotide
  modified_base 79: mod_base = OTHER; note = 2'-O-methyl ribonucleotide
  modified_base 80: mod_base = OTHER; note = 2'-O-methyl ribonucleotide
  modified_base 81: mod_base = OTHER; note = 2'-O-methyl ribonucleotide
  modified_base 83: mod_base = OTHER; note = 2'-O-methyl ribonucleotide
  modified_base 84: mod_base = OTHER; note = 2'-O-methyl ribonucleotide
  modified_base 85: mod_base = OTHER; note = 2'-O-methyl ribonucleotide
  modified_base 86: mod_base = OTHER; note = 2'-O-methyl ribonucleotide
  modified_base 87: mod_base = OTHER; note = 2'-O-methyl ribonucleotide
  modified_base 88: mod_base = OTHER; note = 2'-O-methyl ribonucleotide
  modified_base 89: mod_base = OTHER; note = 2'-O-methyl ribonucleotide
  modified_base 90: mod_base = OTHER; note = 2'-O-methyl ribonucleotide
  modified_base 91: mod_base = OTHER; note = 2'-O-methyl ribonucleotide
  modified_base 92: mod_base = OTHER; note = 2'-O-methyl ribonucleotide
  modified_base 93: mod_base = OTHER; note = 2'-O-methyl ribonucleotide
  modified_base 94: mod_base = OTHER; note = 2'-O-methyl ribonucleotide
  modified_base 95: mod_base = OTHER; note = 2'-O-methyl ribonucleotide
  modified_base 96: mod_base = OTHER; note = 2'-O-methyl ribonucleotide
  modified_base 97: mod_base = OTHER; note = 2'-O-methyl ribonucleotide
  modified_base 98: mod_base = OTHER; note = 2'-O-methyl ribonucleotide
  modified_base 99: mod_base = OTHER; note = 2'-O-methyl ribonucleotide
  modified_base 100: mod_base = OTHER; note = 2'-O-methyl ribonucleotide
  modified_base 101: mod_base = OTHER; note = uniform ribonucleotides (A, C, G, inosine or U), deoxynucleotides (A, G, C, inosine or T), ribonebularine, 2'-O-methylnebularine or deoxynebularine
  modified_base 102: mod_base = OTHER; note = uniform ribonucleotides (A, C, G, inosine or U), deoxynucleotides (A, G, C, inosine or T), ribonebularine, 2'-O-methylnebularine or deoxynebularine
  modified_base 103: mod_base = OTHER; note = uniform ribonucleotides (A, C, G, inosine or U), deoxynucleotides (A, G, C, inosine or T), ribonebularine, 2'-O-methylnebularine or deoxynebularine
  modified_base 1..3: mod_base = OTHER; note = phosphorothioate linkage
  modified_base 25..26: mod_base = OTHER; note = phosphorothioate linkage
  modified_base 45..46: mod_base = OTHER; note = phosphorothioate linkage
  modified_base 64..65: mod_base = OTHER; note = phosphorothioate linkage
  modified_base 97..100: mod_base = OTHER; note = phosphorothioate linkage
  misc_feature 1..100: note = RNA
  misc_feature 101..103: note = Optionally DNA or RNA

SEQ ID NO: 2967 - DNA, 103 bp, synthetic construct; identical to SEQ ID NO: 1795
  source 1..103: mol_type = other DNA
  modified_base 1: mod_base = OTHER; note = 2'-O-methyl ribonucleotide
  modified_base 2: mod_base = OTHER; note = 2'-O-methyl ribonucleotide
  modified_base 3: mod_base = OTHER; note = 2'-O-methyl ribonucleotide
  modified_base 21: mod_base = OTHER; note = 2'-O-methyl ribonucleotide
  modified_base 28: mod_base = OTHER; note = 2'-O-methyl ribonucleotide
  modified_base 29: mod_base = OTHER; note = 2'-O-methyl ribonucleotide
  modified_base 30: mod_base = OTHER; note = 2'-O-methyl ribonucleotide
  modified_base 31: mod_base = OTHER; note = 2'-O-methyl ribonucleotide
  modified_base 32: mod_base = OTHER; note = 2'-O-methyl ribonucleotide
  modified_base 34: mod_base = OTHER; note = 2'-O-methyl ribonucleotide
  modified_base 35: mod_base = OTHER; note = 2'-O-methyl ribonucleotide
  modified_base 36: mod_base = OTHER; note = 2'-O-methyl ribonucleotide
  modified_base 37: mod_base = OTHER; note = 2'-O-methyl ribonucleotide
  modified_base 38: mod_base = OTHER; note = 2'-O-methyl ribonucleotide
  modified_base 39: mod_base = OTHER; note = 2'-O-methyl ribonucleotide
  modified_base 40: mod_base = OTHER; note = 2'-O-methyl ribonucleotide
  modified_base 41: mod_base = OTHER; note = 2'-O-methyl ribonucleotide
  modified_base 42: mod_base = OTHER; note = 2'-O-methyl ribonucleotide
  modified_base 46: mod_base = OTHER; note = 2'-O-methyl ribonucleotide
  modified_base 48: mod_base = OTHER; note = 2'-O-methyl ribonucleotide
  modified_base 50: mod_base = OTHER; note = 2'-O-methyl ribonucleotide
  modified_base 52: mod_base = OTHER; note = 2'-O-methyl ribonucleotide
  modified_base 53: mod_base = OTHER; note = 2'-O-methyl ribonucleotide
  modified_base 54: mod_base = OTHER; note = 2'-O-methyl ribonucleotide
  modified_base 55: mod_base = OTHER; note = 2'-O-methyl ribonucleotide
  modified_base 56: mod_base = OTHER; note = 2'-O-methyl ribonucleotide
  modified_base 57: mod_base = OTHER; note = 2'-O-methyl ribonucleotide
  modified_base 60: mod_base = OTHER; note = 2'-O-methyl ribonucleotide
  modified_base 61: mod_base = OTHER; note = 2'-O-methyl ribonucleotide
  modified_base 66: mod_base = OTHER; note = 2'-O-methyl ribonucleotide
  modified_base 67: mod_base = OTHER; note = 2'-O-methyl ribonucleotide
  modified_base 70: mod_base = OTHER; note = 2'-O-methyl ribonucleotide
  modified_base 71: mod_base = OTHER; note = 2'-O-methyl ribonucleotide
  modified_base 72: mod_base = OTHER; note = 2'-O-methyl ribonucleotide
  modified_base 74: mod_base = OTHER; note = 2'-O-methyl ribonucleotide
  modified_base 75: mod_base = OTHER; note = 2'-O-methyl ribonucleotide
  modified_base 76: mod_base = OTHER; note = 2'-O-methyl ribonucleotide
  modified_base 77: mod_base = OTHER; note = 2'-O-methyl ribonucleotide
  modified_base 78: mod_base = OTHER; note = 2'-O-methyl ribonucleotide
  modified_base 79: mod_base = OTHER; note = 2'-O-methyl ribonucleotide
  modified_base 80: mod_base = OTHER; note = 2'-O-methyl ribonucleotide
  modified_base 81: mod_base = OTHER; note = 2'-O-methyl ribonucleotide
  modified_base 83: mod_base = OTHER; note = 2'-O-methyl ribonucleotide
  modified_base 84: mod_base = OTHER; note = 2'-O-methyl ribonucleotide
  modified_base 85: mod_base = OTHER; note = 2'-O-methyl ribonucleotide
  modified_base 86: mod_base = OTHER; note = 2'-O-methyl ribonucleotide
  modified_base 87: mod_base = OTHER; note = 2'-O-methyl ribonucleotide
  modified_base 88: mod_base = OTHER; note = 2'-O-methyl ribonucleotide
  modified_base 89: mod_base = OTHER; note = 2'-O-methyl ribonucleotide
  modified_base 90: mod_base = OTHER; note = 2'-O-methyl ribonucleotide
  modified_base 91: mod_base = OTHER; note = 2'-O-methyl ribonucleotide
  modified_base 92: mod_base = OTHER; note = 2'-O-methyl ribonucleotide
  modified_base 93: mod_base = OTHER; note = 2'-O-methyl ribonucleotide
  modified_base 94: mod_base = OTHER; note = 2'-O-methyl ribonucleotide
  modified_base 95: mod_base = OTHER; note = 2'-O-methyl ribonucleotide
  modified_base 96: mod_base = OTHER; note = 2'-O-methyl ribonucleotide
  modified_base 97: mod_base = OTHER; note = 2'-O-methyl ribonucleotide
  modified_base 98: mod_base = OTHER; note = 2'-O-methyl ribonucleotide
  modified_base 99: mod_base = OTHER; note = 2'-O-methyl ribonucleotide
  modified_base 100: mod_base = OTHER; note = 2'-O-methyl ribonucleotide
  modified_base 101: mod_base = OTHER; note = uniform ribonucleotides (A, C, G, inosine or U), deoxynucleotides (A, G, C, inosine or T), ribonebularine, 2'-O-methylnebularine or deoxynebularine
  modified_base 102: mod_base = OTHER; note = uniform ribonucleotides (A, C, G, inosine or U), deoxynucleotides (A, G, C, inosine or T), ribonebularine, 2'-O-methylnebularine or deoxynebularine
  modified_base 103: mod_base = OTHER; note = uniform ribonucleotides (A, C, G, inosine or U), deoxynucleotides (A, G, C, inosine or T), ribonebularine, 2'-O-methylnebularine or deoxynebularine
  modified_base 1..3: mod_base = OTHER; note = phosphorothioate linkage
  modified_base 25..26: mod_base = OTHER; note = phosphorothioate linkage
  modified_base 45..46: mod_base = OTHER; note = phosphorothioate linkage
  modified_base 64..65: mod_base = OTHER; note = phosphorothioate linkage
  modified_base 97..100: mod_base = OTHER; note = phosphorothioate linkage
  misc_feature 1..100: note = RNA
  misc_feature 101..103: note = Optionally DNA or RNA

SEQ ID NO: 2968 - DNA, 103 bp, synthetic construct; identical to SEQ ID NO: 1796
  source 1..103: mol_type = other DNA
  modified_base 1: mod_base = OTHER; note = 2'-O-methyl ribonucleotide
  modified_base 2: mod_base = OTHER; note = 2'-O-methyl ribonucleotide
  modified_base 3: mod_base = OTHER; note = 2'-O-methyl ribonucleotide
  modified_base 21: mod_base = OTHER; note = 2'-O-methyl ribonucleotide
  modified_base 28: mod_base = OTHER; note = 2'-O-methyl ribonucleotide
  modified_base 29: mod_base = OTHER; note = 2'-O-methyl ribonucleotide
  modified_base 30: mod_base = OTHER; note = 2'-O-methyl ribonucleotide
  modified_base 31: mod_base = OTHER; note = 2'-O-methyl ribonucleotide
  modified_base 32: mod_base = OTHER; note = 2'-O-methyl ribonucleotide
  modified_base 34: mod_base = OTHER; note = 2'-O-methyl ribonucleotide
  modified_base 35: mod_base = OTHER; note = 2'-O-methyl ribonucleotide
  modified_base 36: mod_base = OTHER; note = 2'-O-methyl ribonucleotide
  modified_base 37: mod_base = OTHER; note = 2'-O-methyl ribonucleotide
  modified_base 38: mod_base = OTHER; note = 2'-O-methyl ribonucleotide
  modified_base 39: mod_base = OTHER; note = 2'-O-methyl ribonucleotide
  modified_base 40: mod_base = OTHER; note = 2'-O-methyl ribonucleotide
  modified_base 41: mod_base = OTHER; note = 2'-O-methyl ribonucleotide
  modified_base 42: mod_base = OTHER; note = 2'-O-methyl ribonucleotide
  modified_base 46: mod_base = OTHER; note = 2'-O-methyl ribonucleotide
  modified_base 48: mod_base = OTHER; note = 2'-O-methyl ribonucleotide
  modified_base 50: mod_base = OTHER; note = 2'-O-methyl ribonucleotide
  modified_base 52: mod_base = OTHER; note = 2'-O-methyl ribonucleotide
  modified_base 53: mod_base = OTHER; note = 2'-O-methyl ribonucleotide
  modified_base 54: mod_base = OTHER; note = 2'-O-methyl ribonucleotide
  modified_base 55: mod_base = OTHER; note = 2'-O-methyl ribonucleotide
  modified_base 56: mod_base = OTHER; note = 2'-O-methyl ribonucleotide
  modified_base 57: mod_base = OTHER; note = 2'-O-methyl ribonucleotide
  modified_base 60: mod_base = OTHER; note = 2'-O-methyl ribonucleotide
  modified_base 61: mod_base = OTHER; note = 2'-O-methyl ribonucleotide
  modified_base 66: mod_base = OTHER; note = 2'-O-methyl ribonucleotide
  modified_base 67: mod_base = OTHER; note = 2'-O-methyl ribonucleotide
  modified_base 70: mod_base = OTHER; note = 2'-O-methyl ribonucleotide
  modified_base 71: mod_base = OTHER; note = 2'-O-methyl ribonucleotide
  modified_base 72: mod_base = OTHER; note = 2'-O-methyl ribonucleotide
  modified_base 74: mod_base = OTHER; note = 2'-O-methyl ribonucleotide
  modified_base 75: mod_base = OTHER; note = 2'-O-methyl ribonucleotide
  modified_base 76: mod_base = OTHER; note = 2'-O-methyl ribonucleotide
  modified_base 77: mod_base = OTHER; note = 2'-O-methyl ribonucleotide
  modified_base 78: mod_base = OTHER; note = 2'-O-methyl ribonucleotide
  modified_base 79: mod_base = OTHER; note = 2'-O-methyl ribonucleotide
  modified_base 80: mod_base = OTHER; note = 2'-O-methyl ribonucleotide
  modified_base 81: mod_base = OTHER; note = 2'-O-methyl ribonucleotide
  modified_base 83: mod_base = OTHER; note = 2'-O-methyl ribonucleotide
  modified_base 84: mod_base = OTHER; note = 2'-O-methyl ribonucleotide
  modified_base 85: mod_base = OTHER; note = 2'-O-methyl ribonucleotide
  modified_base 86: mod_base = OTHER; note = 2'-O-methyl ribonucleotide
  modified_base 87: mod_base = OTHER; note = 2'-O-methyl ribonucleotide
  modified_base 88: mod_base = OTHER; note = 2'-O-methyl ribonucleotide
  modified_base 89: mod_base = OTHER; note = 2'-O-methyl ribonucleotide
  modified_base 90: mod_base = OTHER; note = 2'-O-methyl ribonucleotide
  modified_base 91: mod_base = OTHER; note = 2'-O-methyl ribonucleotide
  modified_base 92: mod_base = OTHER; note = 2'-O-methyl ribonucleotide
  modified_base 93: mod_base = OTHER; note = 2'-O-methyl ribonucleotide
  modified_base 94: mod_base = OTHER; note = 2'-O-methyl ribonucleotide
  modified_base 95: mod_base = OTHER; note = 2'-O-methyl ribonucleotide
  modified_base 96: mod_base = OTHER; note = 2'-O-methyl ribonucleotide
  modified_base 97: mod_base = OTHER; note = 2'-O-methyl ribonucleotide
  modified_base 98: mod_base = OTHER; note = 2'-O-methyl ribonucleotide
  modified_base 99: mod_base = OTHER; note = 2'-O-methyl ribonucleotide
  modified_base 100: mod_base = OTHER; note = 2'-O-methyl ribonucleotide
  modified_base 101: mod_base = OTHER; note = uniform ribonucleotides (A, C, G, inosine or U), deoxynucleotides (A, G, C, inosine or T), ribonebularine, 2'-O-methylnebularine or deoxynebularine
  modified_base 102: mod_base = OTHER; note = uniform ribonucleotides (A, C, G, inosine or U), deoxynucleotides (A, G, C, inosine or T), ribonebularine, 2'-O-methylnebularine or deoxynebularine
  modified_base 103: mod_base = OTHER; note = uniform ribonucleotides (A, C, G, inosine or U), deoxynucleotides (A, G, C, inosine or T), ribonebularine, 2'-O-methylnebularine or deoxynebularine
  modified_base 1..3: mod_base = OTHER; note = phosphorothioate linkage
  modified_base 25..26: mod_base = OTHER; note = phosphorothioate linkage
  modified_base 45..46: mod_base = OTHER; note = phosphorothioate linkage
  modified_base 64..65: mod_base = OTHER; note = phosphorothioate linkage
  modified_base 97..100: mod_base = OTHER; note = phosphorothioate linkage
  misc_feature 1..100: note = RNA
  misc_feature 101..103: note = Optionally DNA or RNA

SEQ ID NO: 2969 - DNA, 103 bp, synthetic construct; identical to SEQ ID NO: 1797
  source 1..103: mol_type = other DNA
  modified_base 1: mod_base = OTHER; note = 2'-O-methyl ribonucleotide
  modified_base 2: mod_base = OTHER; note = 2'-O-methyl ribonucleotide
  modified_base 3: mod_base = OTHER; note = 2'-O-methyl ribonucleotide
  modified_base 21: mod_base = OTHER; note = 2'-O-methyl ribonucleotide
  modified_base 28: mod_base = OTHER; note = 2'-O-methyl ribonucleotide
  modified_base 29: mod_base = OTHER; note = 2'-O-methyl ribonucleotide
  modified_base 30: mod_base = OTHER; note = 2'-O-methyl ribonucleotide
  modified_base 31: mod_base = OTHER; note = 2'-O-methyl ribonucleotide
  modified_base 32: mod_base = OTHER; note = 2'-O-methyl ribonucleotide
  modified_base 33: mod_base = OTHER; note = 2'-O-methyl ribonucleotide
  modified_base 34: mod_base = OTHER; note = 2'-O-methyl ribonucleotide
  modified_base 35: mod_base = OTHER; note = 2'-O-methyl ribonucleotide
  modified_base 36: mod_base = OTHER; note = 2'-O-methyl ribonucleotide
  modified_base 37: mod_base = OTHER; note = 2'-O-methyl ribonucleotide
  modified_base 38: mod_base = OTHER; note = 2'-O-methyl ribonucleotide
  modified_base 39: mod_base = OTHER; note = 2'-O-methyl ribonucleotide
  modified_base 40: mod_base = OTHER; note = 2'-O-methyl ribonucleotide
  modified_base 41: mod_base = OTHER; note = 2'-O-methyl ribonucleotide
  modified_base 42: mod_base = OTHER; note = 2'-O-methyl ribonucleotide
  modified_base 46: mod_base = OTHER; note = 2'-O-methyl ribonucleotide
  modified_base 48: mod_base = OTHER; note = 2'-O-methyl ribonucleotide
  modified_base 50: mod_base = OTHER; note = 2'-O-methyl ribonucleotide
  modified_base 52: mod_base = OTHER; note = 2'-O-methyl ribonucleotide
  modified_base 53: mod_base = OTHER; note = 2'-O-methyl ribonucleotide
  modified_base 54: mod_base = OTHER; note = 2'-O-methyl ribonucleotide
  modified_base 57: mod_base = OTHER; note = 2'-O-methyl ribonucleotide
  modified_base 61: mod_base = OTHER; note = 2'-O-methyl ribonucleotide
  modified_base 66: mod_base = OTHER; note = 2'-O-methyl ribonucleotide
  modified_base 67: mod_base = OTHER; note = 2'-O-methyl ribonucleotide
  modified_base 70: mod_base = OTHER; note = 2'-O-methyl ribonucleotide
  modified_base 71: mod_base = OTHER; note = 2'-O-methyl ribonucleotide
  modified_base 72: mod_base = OTHER; note = 2'-O-methyl ribonucleotide
  modified_base 74: mod_base = OTHER; note = 2'-O-methyl ribonucleotide
  modified_base 75: mod_base = OTHER; note = 2'-O-methyl ribonucleotide
  modified_base 76: mod_base = OTHER; note = 2'-O-methyl ribonucleotide
  modified_base 77: mod_base = OTHER; note = 2'-O-methyl ribonucleotide
  modified_base 78: mod_base = OTHER; note = 2'-O-methyl ribonucleotide
  modified_base 79: mod_base = OTHER; note = 2'-O-methyl ribonucleotide
  modified_base 80: mod_base = OTHER; note = 2'-O-methyl ribonucleotide
  modified_base 82: mod_base = OTHER; note = 2'-O-methyl ribonucleotide
  modified_base 83: mod_base = OTHER; note = 2'-O-methyl ribonucleotide
  modified_base 84: mod_base = OTHER; note = 2'-O-methyl ribonucleotide
  modified_base 85: mod_base = OTHER; note = 2'-O-methyl ribonucleotide
  modified_base 86: mod_base = OTHER; note = 2'-O-methyl ribonucleotide
  modified_base 87: mod_base = OTHER; note = 2'-O-methyl ribonucleotide
  modified_base 89: mod_base = OTHER; note = 2'-O-methyl ribonucleotide
  modified_base 92: mod_base = OTHER; note = 2'-O-methyl ribonucleotide
  modified_base 93: mod_base = OTHER; note = 2'-O-methyl ribonucleotide
  modified_base 94: mod_base = OTHER; note = 2'-O-methyl ribonucleotide
  modified_base 95: mod_base = OTHER; note = 2'-O-methyl ribonucleotide
  modified_base 96: mod_base = OTHER; note = 2'-O-methyl ribonucleotide
  modified_base 97: mod_base = OTHER; note = 2'-O-methyl ribonucleotide
  modified_base 98: mod_base = OTHER; note = 2'-O-methyl ribonucleotide
  modified_base 99: mod_base = OTHER; note = 2'-O-methyl ribonucleotide
  modified_base 100: mod_base = OTHER; note = 2'-O-methyl ribonucleotide
  modified_base 101: mod_base = OTHER; note = uniform ribonucleotides (A, C, G, inosine or U), deoxynucleotides (A, G, C, inosine or T), ribonebularine, 2'-O-methylnebularine or deoxynebularine
  modified_base 102: mod_base = OTHER; note = uniform ribonucleotides (A, C, G, inosine or U), deoxynucleotides (A, G, C, inosine or T), ribonebularine, 2'-O-methylnebularine or deoxynebularine
  modified_base 103: mod_base = OTHER; note = uniform ribonucleotides (A, C, G, inosine or U), deoxynucleotides (A, G, C, inosine or T), ribonebularine, 2'-O-methylnebularine or deoxynebularine
  modified_base 1..3: mod_base = OTHER; note = phosphorothioate linkage
  modified_base 25..26: mod_base = OTHER; note = phosphorothioate linkage
  modified_base 45..46: mod_base = OTHER; note = phosphorothioate linkage
  modified_base 64..65: mod_base = OTHER; note = phosphorothioate linkage
  modified_base 97..100: mod_base = OTHER; note = phosphorothioate linkage
  misc_feature 1..100: note = RNA
  misc_feature 101..103: note = Optionally DNA or RNA

SEQ ID NO: 2970 - DNA, 103 bp, synthetic construct; identical to SEQ ID NO: 1797
  source 1..103: mol_type = other DNA
  modified_base 1: mod_base = OTHER; note = 2'-O-methyl ribonucleotide
  modified_base 2: mod_base = OTHER; note = 2'-O-methyl ribonucleotide
  modified_base 3: mod_base = OTHER; note = 2'-O-methyl ribonucleotide
  modified_base 21: mod_base = OTHER; note = 2'-O-methyl ribonucleotide
  modified_base 28: mod_base = OTHER; note = 2'-O-methyl ribonucleotide
  modified_base 29: mod_base = OTHER; note = 2'-O-methyl ribonucleotide
  modified_base 30: mod_base = OTHER; note = 2'-O-methyl ribonucleotide
  modified_base 31: mod_base = OTHER; note = 2'-O-methyl ribonucleotide
  modified_base 32: mod_base = OTHER; note = 2'-O-methyl ribonucleotide
  modified_base 33: mod_base = OTHER; note = 2'-O-methyl ribonucleotide
  modified_base 34: mod_base = OTHER; note = 2'-O-methyl ribonucleotide
  modified_base 35: mod_base = OTHER; note = 2'-O-methyl ribonucleotide
  modified_base 36: mod_base = OTHER; note = 2'-O-methyl ribonucleotide
  modified_base 37: mod_base = OTHER; note = 2'-O-methyl ribonucleotide
  modified_base 38: mod_base = OTHER; note = 2'-O-methyl ribonucleotide
  modified_base 39: mod_base = OTHER; note = 2'-O-methyl ribonucleotide
  modified_base 40: mod_base = OTHER; note = 2'-O-methyl ribonucleotide
  modified_base 41: mod_base = OTHER; note = 2'-O-methyl ribonucleotide
  modified_base 42: mod_base = OTHER; note = 2'-O-methyl ribonucleotide
  modified_base 46: mod_base = OTHER; note = 2'-O-methyl ribonucleotide
  modified_base 48: mod_base = OTHER; note = 2'-O-methyl ribonucleotide
  modified_base 50: mod_base = OTHER; note = 2'-O-methyl ribonucleotide
  modified_base 52: mod_base = OTHER; note = 2'-O-methyl ribonucleotide
  modified_base 53: mod_base = OTHER; note = 2'-O-methyl ribonucleotide
  modified_base 54: mod_base = OTHER; note = 2'-O-methyl ribonucleotide
  modified_base 55: mod_base = OTHER; note = 2'-O-methyl ribonucleotide
  modified_base 56: mod_base = OTHER; note = 2'-O-methyl ribonucleotide
  modified_base 57: mod_base = OTHER; note = 2'-O-methyl ribonucleotide
  modified_base 60: mod_base = OTHER; note = 2'-O-methyl ribonucleotide
  modified_base 61: mod_base = OTHER; note = 2'-O-methyl ribonucleotide
  modified_base 66: mod_base = OTHER; note = 2'-O-methyl ribonucleotide
  modified_base 67: mod_base = OTHER; note = 2'-O-methyl ribonucleotide
  modified_base 70: mod_base = OTHER; note = 2'-O-methyl ribonucleotide
  modified_base 71: mod_base = OTHER; note = 2'-O-methyl ribonucleotide
  modified_base 72: mod_base = OTHER; note = 2'-O-methyl ribonucleotide
  modified_base 74: mod_base = OTHER; note = 2'-O-methyl ribonucleotide
  modified_base 75: mod_base = OTHER; note = 2'-O-methyl ribonucleotide
  modified_base 76: mod_base = OTHER; note = 2'-O-methyl ribonucleotide
  modified_base 77: mod_base = OTHER; note = 2'-O-methyl ribonucleotide
  modified_base 78: mod_base = OTHER; note = 2'-O-methyl ribonucleotide
  modified_base 79: mod_base = OTHER; note = 2'-O-methyl ribonucleotide
  modified_base 80: mod_base = OTHER; note = 2'-O-methyl ribonucleotide
  modified_base 82: mod_base = OTHER; note = 2'-O-methyl ribonucleotide
  modified_base 83: mod_base = OTHER; note = 2'-O-methyl ribonucleotide
  modified_base 84: mod_base = OTHER; note = 2'-O-methyl ribonucleotide
  modified_base 85: mod_base = OTHER; note = 2'-O-methyl ribonucleotide
  modified_base 86: mod_base = OTHER; note = 2'-O-methyl ribonucleotide
  modified_base 87: mod_base = OTHER; note = 2'-O-methyl ribonucleotide
  modified_base 89: mod_base = OTHER; note = 2'-O-methyl ribonucleotide
  modified_base 92: mod_base = OTHER; note = 2'-O-methyl ribonucleotide
  modified_base 93: mod_base = OTHER; note = 2'-O-methyl ribonucleotide
  modified_base 94: mod_base = OTHER; note = 2'-O-methyl ribonucleotide
  modified_base 95: mod_base = OTHER; note = 2'-O-methyl ribonucleotide
  modified_base 96: mod_base = OTHER; note = 2'-O-methyl ribonucleotide
  modified_base 97: mod_base = OTHER; note = 2'-O-methyl ribonucleotide
  modified_base 98: mod_base = OTHER; note = 2'-O-methyl ribonucleotide
  modified_base 99: mod_base = OTHER; note = 2'-O-methyl ribonucleotide
  modified_base 100: mod_base = OTHER; note = 2'-O-methyl ribonucleotide
  modified_base 101: mod_base = OTHER; note = uniform ribonucleotides (A, C, G, inosine or U), deoxynucleotides (A, G, C, inosine or T), ribonebularine, 2'-O-methylnebularine or deoxynebularine
  modified_base 102: mod_base = OTHER; note = uniform ribonucleotides (A, C, G, inosine or U), deoxynucleotides (A, G, C, inosine or T), ribonebularine, 2'-O-methylnebularine or deoxynebularine
  modified_base 103: mod_base = OTHER; note = uniform ribonucleotides (A, C, G, inosine or U), deoxynucleotides (A, G, C, inosine or T), ribonebularine, 2'-O-methylnebularine or deoxynebularine
  modified_base 1..3: mod_base = OTHER; note = phosphorothioate linkage
  modified_base 25..26: mod_base = OTHER; note = phosphorothioate linkage
  modified_base 45..46: mod_base = OTHER; note = phosphorothioate linkage
  modified_base 64..65: mod_base = OTHER; note = phosphorothioate linkage
  modified_base 97..100: mod_base = OTHER; note = phosphorothioate linkage
  misc_feature 1..100: note = RNA
  misc_feature 101..103: note = Optionally DNA or RNA

SEQ ID NO: 2971 - DNA, 103 bp, synthetic construct; identical to SEQ ID NO: 1797
  source 1..103: mol_type = other DNA
  modified_base 1: mod_base = OTHER; note = 2'-O-methyl ribonucleotide
  modified_base 2: mod_base = OTHER; note = 2'-O-methyl ribonucleotide
  modified_base 3: mod_base = OTHER; note = 2'-O-methyl ribonucleotide
  modified_base 21: mod_base = OTHER; note = 2'-O-methyl ribonucleotide
  modified_base 28: mod_base = OTHER; note = 2'-O-methyl ribonucleotide
  modified_base 29: mod_base = OTHER; note = 2'-O-methyl ribonucleotide
  modified_base 30: mod_base = OTHER; note = 2'-O-methyl ribonucleotide
  modified_base 31: mod_base = OTHER; note = 2'-O-methyl ribonucleotide
  modified_base 32: mod_base = OTHER; note = 2'-O-methyl ribonucleotide
  modified_base 33: mod_base = OTHER; note = 2'-O-methyl ribonucleotide
  modified_base 34: mod_base = OTHER; note = 2'-O-methyl ribonucleotide
  modified_base 35: mod_base = OTHER; note = 2'-O-methyl ribonucleotide
  modified_base 36: mod_base = OTHER; note = 2'-O-methyl ribonucleotide
  modified_base 37: mod_base = OTHER; note = 2'-O-methyl ribonucleotide
  modified_base 38: mod_base = OTHER; note = 2'-O-methyl ribonucleotide
  modified_base 39: mod_base = OTHER; note = 2'-O-methyl ribonucleotide
  modified_base 40: mod_base = OTHER; note = 2'-O-methyl ribonucleotide
  modified_base 41: mod_base = OTHER; note = 2'-O-methyl ribonucleotide
  modified_base 42: mod_base = OTHER; note = 2'-O-methyl ribonucleotide
  modified_base 46: mod_base = OTHER; note = 2'-O-methyl ribonucleotide
  modified_base 48: mod_base = OTHER; note = 2'-O-methyl ribonucleotide
  modified_base 50: mod_base = OTHER; note = 2'-O-methyl ribonucleotide
  modified_base 52: mod_base = OTHER; note = 2'-O-methyl ribonucleotide
  modified_base 53: mod_base = OTHER; note = 2'-O-methyl ribonucleotide
  modified_base 54: mod_base = OTHER; note = 2'-O-methyl ribonucleotide
  modified_base 57: mod_base = OTHER; note = 2'-O-methyl ribonucleotide
  modified_base 61: mod_base = OTHER; note = 2'-O-methyl ribonucleotide
  modified_base 66: mod_base = OTHER; note = 2'-O-methyl ribonucleotide
  modified_base 67: mod_base = OTHER; note = 2'-O-methyl ribonucleotide
  modified_base 70: mod_base = OTHER; note = 2'-O-methyl ribonucleotide
  modified_base 71: mod_base = OTHER; note = 2'-O-methyl ribonucleotide
  modified_base 72: mod_base = OTHER; note = 2'-O-methyl ribonucleotide
  modified_base 73: mod_base = OTHER; note = 2'-O-methyl ribonucleotide
  modified_base 74: mod_base = OTHER; note = 2'-O-methyl ribonucleotide
  modified_base 75: mod_base = OTHER; note = 2'-O-methyl ribonucleotide
  modified_base 76: mod_base = OTHER; note = 2'-O-methyl ribonucleotide
  modified_base 77: mod_base = OTHER; note = 2'-O-methyl ribonucleotide
  modified_base 78: mod_base = OTHER; note = 2'-O-methyl ribonucleotide
  modified_base 79: mod_base = OTHER; note = 2'-O-methyl ribonucleotide
  modified_base 80: mod_base = OTHER; note = 2'-O-methyl ribonucleotide
  modified_base 82: mod_base = OTHER; note = 2'-O-methyl ribonucleotide
  modified_base 83: mod_base = OTHER; note = 2'-O-methyl ribonucleotide
  modified_base 84: mod_base = OTHER; note = 2'-O-methyl ribonucleotide
  modified_base 85: mod_base = OTHER; note = 2'-O-methyl ribonucleotide
  modified_base 86: mod_base = OTHER; note = 2'-O-methyl ribonucleotide
  modified_base 87: mod_base = OTHER; note = 2'-O-methyl ribonucleotide
  modified_base 89: mod_base = OTHER; note = 2'-O-methyl ribonucleotide
  modified_base 92: mod_base = OTHER; note = 2'-O-methyl ribonucleotide
  modified_base 93: mod_base = OTHER; note = 2'-O-methyl ribonucleotide
  modified_base 94: mod_base = OTHER; note = 2'-O-methyl ribonucleotide
  modified_base 95: mod_base = OTHER; note = 2'-O-methyl ribonucleotide
  modified_base 96: mod_base = OTHER; note = 2'-O-methyl ribonucleotide
  modified_base 97: mod_base = OTHER; note = 2'-O-methyl ribonucleotide
  modified_base 98: mod_base = OTHER; note = 2'-O-methyl ribonucleotide
  modified_base 99: mod_base = OTHER; note = 2'-O-methyl ribonucleotide
  modified_base 100: mod_base = OTHER; note = 2'-O-methyl ribonucleotide
  modified_base 101: mod_base = OTHER; note = uniform ribonucleotides (A, C, G, inosine or U), deoxynucleotides (A, G, C, inosine or T), ribonebularine, 2'-O-methylnebularine or deoxynebularine
  modified_base 102: mod_base = OTHER; note = uniform ribonucleotides (A, C, G, inosine or U), deoxynucleotides (A, G, C, inosine or T), ribonebularine, 2'-O-methylnebularine or deoxynebularine
  modified_base 103: mod_base = OTHER; note = uniform ribonucleotides (A, C, G, inosine or U), deoxynucleotides (A, G, C, inosine or T), ribonebularine, 2'-O-methylnebularine or deoxynebularine
  modified_base 1..3: mod_base = OTHER; note = phosphorothioate linkage
  modified_base 25..26: mod_base = OTHER; note = phosphorothioate linkage
  modified_base 45..46: mod_base = OTHER; note = phosphorothioate linkage
  modified_base 64..65: mod_base = OTHER; note = phosphorothioate linkage
  modified_base 97..100: mod_base = OTHER; note = phosphorothioate linkage
  misc_feature 1..100: note = RNA
  misc_feature 101..103: note = Optionally DNA or RNA

SEQ ID NO: 2972 - DNA, 103 bp, synthetic construct; identical to SEQ ID NO: 1797
  source 1..103: mol_type = other DNA
  modified_base 1: mod_base = OTHER; note = 2'-O-methyl ribonucleotide
  modified_base 2: mod_base = OTHER; note = 2'-O-methyl ribonucleotide
  modified_base 3: mod_base = OTHER; note = 2'-O-methyl ribonucleotide
  modified_base 21: mod_base = OTHER; note = 2'-O-methyl ribonucleotide
  modified_base 28: mod_base = OTHER; note = 2'-O-methyl ribonucleotide
  modified_base 29: mod_base = OTHER; note = 2'-O-methyl ribonucleotide
  modified_base 30: mod_base = OTHER; note = 2'-O-methyl ribonucleotide
  modified_base 31: mod_base = OTHER; note = 2'-O-methyl ribonucleotide
  modified_base 32: mod_base = OTHER; note = 2'-O-methyl ribonucleotide
  modified_base 33: mod_base = OTHER; note = 2'-O-methyl ribonucleotide
  modified_base 34: mod_base = OTHER; note = 2'-O-methyl ribonucleotide
  modified_base 35: mod_base = OTHER; note = 2'-O-methyl ribonucleotide
  modified_base 36: mod_base = OTHER; note = 2'-O-methyl ribonucleotide
  modified_base 37: mod_base = OTHER; note = 2'-O-methyl ribonucleotide
  modified_base 38: mod_base = OTHER; note = 2'-O-methyl ribonucleotide
  modified_base 39: mod_base = OTHER; note = 2'-O-methyl ribonucleotide
  modified_base 40: mod_base = OTHER; note = 2'-O-methyl ribonucleotide
  modified_base 41: mod_base = OTHER; note = 2'-O-methyl ribonucleotide
  modified_base 42: mod_base = OTHER; note = 2'-O-methyl ribonucleotide
  modified_base 46: mod_base = OTHER; note = 2'-O-methyl ribonucleotide
  modified_base 48: mod_base = OTHER; note = 2'-O-methyl ribonucleotide
  modified_base 50: mod_base = OTHER; note = 2'-O-methyl ribonucleotide
  modified_base 52: mod_base = OTHER; note = 2'-O-methyl ribonucleotide
  modified_base 53: mod_base = OTHER; note = 2'-O-methyl ribonucleotide
  modified_base 54: mod_base = OTHER; note = 2'-O-methyl ribonucleotide
  modified_base 57: mod_base = OTHER; note = 2'-O-methyl ribonucleotide
  modified_base 61: mod_base = OTHER; note = 2'-O-methyl ribonucleotide
  modified_base 66: mod_base = OTHER; note = 2'-O-methyl ribonucleotide
  modified_base 67: mod_base = OTHER; note = 2'-O-methyl ribonucleotide
  modified_base 70: mod_base = OTHER; note = 2'-O-methyl ribonucleotide
  modified_base 71: mod_base = OTHER; note = 2'-O-methyl ribonucleotide
  modified_base 72: mod_base = OTHER; note = 2'-O-methyl ribonucleotide
  modified_base 73: mod_base = OTHER; note = 2'-O-methyl ribonucleotide
  modified_base 74: mod_base = OTHER; note = 2'-O-methyl ribonucleotide
  modified_base 75: mod_base = OTHER; note = 2'-O-methyl ribonucleotide
  modified_base 76: mod_base = OTHER; note = 2'-O-methyl ribonucleotide
  modified_base 77: mod_base = OTHER; note = 2'-O-methyl ribonucleotide
  modified_base 78: mod_base = OTHER; note = 2'-O-methyl ribonucleotide
  modified_base 79: mod_base = OTHER; note = 2'-O-methyl ribonucleotide
  modified_base 80: mod_base = OTHER; note = 2'-O-methyl ribonucleotide
  modified_base 82: mod_base = OTHER; note = 2'-O-methyl ribonucleotide
  modified_base 83: mod_base = OTHER; note = 2'-O-methyl ribonucleotide
  modified_base 84: mod_base = OTHER; note = 2'-O-methyl ribonucleotide
  modified_base 85: mod_base = OTHER; note = 2'-O-methyl ribonucleotide
  modified_base 86: mod_base = OTHER; note = 2'-O-methyl ribonucleotide
  modified_base 87: mod_base = OTHER; note = 2'-O-methyl ribonucleotide
  modified_base 89: mod_base = OTHER; note = 2'-O-methyl ribonucleotide
  modified_base 91: mod_base = OTHER; note = 2'-O-methyl ribonucleotide
  modified_base 92: mod_base = OTHER; note = 2'-O-methyl ribonucleotide
  modified_base 93: mod_base = OTHER; note = 2'-O-methyl ribonucleotide
  modified_base 94: mod_base = OTHER; note = 2'-O-methyl ribonucleotide
  modified_base 95: mod_base = OTHER; note = 2'-O-methyl ribonucleotide
  modified_base 96: mod_base = OTHER; note = 2'-O-methyl ribonucleotide
  modified_base 97: mod_base = OTHER; note = 2'-O-methyl ribonucleotide
  modified_base 98: mod_base = OTHER; note = 2'-O-methyl ribonucleotide
  modified_base 99: mod_base = OTHER; note = 2'-O-methyl ribonucleotide
  modified_base 100: mod_base = OTHER; note = 2'-O-methyl ribonucleotide
  modified_base 101: mod_base = OTHER; note = uniform ribonucleotides (A, C, G, inosine or U), deoxynucleotides (A, G, C, inosine or T), ribonebularine, 2'-O-methylnebularine or deoxynebularine
  modified_base 102: mod_base = OTHER; note = uniform ribonucleotides (A, C, G, inosine or U), deoxynucleotides (A, G, C, inosine or T), ribonebularine, 2'-O-methylnebularine or deoxynebularine
  modified_base 103: mod_base = OTHER; note = uniform ribonucleotides (A, C, G, inosine or U), deoxynucleotides (A, G, C, inosine or T), ribonebularine, 2'-O-methylnebularine or deoxynebularine
  modified_base 1..3: mod_base = OTHER; note = phosphorothioate linkage
  modified_base 25..26: mod_base = OTHER; note = phosphorothioate linkage
  modified_base 45..46: mod_base = OTHER; note = phosphorothioate linkage
  modified_base 64..65: mod_base = OTHER; note = phosphorothioate linkage
  modified_base 97..100: mod_base = OTHER; note = phosphorothioate linkage
  misc_feature 1..100: note = RNA
  misc_feature 101..103: note = Optionally DNA or RNA

SEQ ID NO: 2973 - DNA, 103 bp, synthetic construct; identical to SEQ ID NO: 1797
  source 1..103: mol_type = other DNA
  modified_base 1: mod_base = OTHER; note = 2'-O-methyl ribonucleotide
  modified_base 2: mod_base = OTHER; note = 2'-O-methyl ribonucleotide
  modified_base 3: mod_base = OTHER; note = 2'-O-methyl ribonucleotide
  modified_base 21: mod_base = OTHER; note = 2'-O-methyl ribonucleotide
  modified_base 28: mod_base = OTHER; note = 2'-O-methyl ribonucleotide
  modified_base 29: mod_base = OTHER; note = 2'-O-methyl ribonucleotide
  modified_base 30: mod_base = OTHER; note = 2'-O-methyl ribonucleotide
  modified_base 31: mod_base = OTHER; note = 2'-O-methyl ribonucleotide
  modified_base 32: mod_base = OTHER; note = 2'-O-methyl ribonucleotide
  modified_base 34: mod_base = OTHER; note = 2'-O-methyl ribonucleotide
  modified_base 35: mod_base = OTHER; note = 2'-O-methyl ribonucleotide
  modified_base 36: mod_base = OTHER; note = 2'-O-methyl ribonucleotide
  modified_base 37: mod_base = OTHER; note = 2'-O-methyl ribonucleotide
  modified_base 38: mod_base = OTHER; note = 2'-O-methyl ribonucleotide
  modified_base 39: mod_base = OTHER; note = 2'-O-methyl ribonucleotide
  modified_base 40: mod_base = OTHER; note = 2'-O-methyl ribonucleotide
  modified_base 41: mod_base = OTHER; note = 2'-O-methyl ribonucleotide
  modified_base 42: mod_base = OTHER; note = 2'-O-methyl ribonucleotide
  modified_base 46: mod_base = OTHER; note = 2'-O-methyl ribonucleotide
  modified_base 48: mod_base = OTHER; note = 2'-O-methyl ribonucleotide
  modified_base 50: mod_base = OTHER; note = 2'-O-methyl ribonucleotide
  modified_base 52: mod_base = OTHER; note = 2'-O-methyl ribonucleotide
  modified_base 53: mod_base = OTHER; note = 2'-O-methyl ribonucleotide
  modified_base 54: mod_base = OTHER; note = 2'-O-methyl ribonucleotide
  modified_base 57: mod_base = OTHER; note = 2'-O-methyl ribonucleotide
  modified_base 61: mod_base = OTHER; note = 2'-O-methyl ribonucleotide
  modified_base 66: mod_base = OTHER; note = 2'-O-methyl ribonucleotide
  modified_base 67: mod_base = OTHER; note = 2'-O-methyl ribonucleotide
  modified_base 70: mod_base = OTHER; note = 2'-O-methyl ribonucleotide
  modified_base 71: mod_base = OTHER; note = 2'-O-methyl ribonucleotide
  modified_base 72: mod_base = OTHER; note = 2'-O-methyl ribonucleotide
  modified_base 73: mod_base = OTHER; note = 2'-O-methyl ribonucleotide
  modified_base 74: mod_base = OTHER; note = 2'-O-methyl ribonucleotide
  modified_base 75: mod_base = OTHER; note = 2'-O-methyl ribonucleotide
  modified_base 76: mod_base = OTHER; note = 2'-O-methyl ribonucleotide
  modified_base 77: mod_base = OTHER; note = 2'-O-methyl ribonucleotide
  modified_base 78: mod_base = OTHER; note = 2'-O-methyl ribonucleotide
  modified_base 79: mod_base = OTHER; note = 2'-O-methyl ribonucleotide
  modified_base 80: mod_base = OTHER; note = 2'-O-methyl ribonucleotide
  modified_base 82: mod_base = OTHER; note = 2'-O-methyl ribonucleotide
  modified_base 83: mod_base = OTHER; note = 2'-O-methyl ribonucleotide
  modified_base 84: mod_base = OTHER; note = 2'-O-methyl ribonucleotide
  modified_base 85: mod_base = OTHER; note = 2'-O-methyl ribonucleotide
  modified_base 86: mod_base = OTHER; note = 2'-O-methyl ribonucleotide
  modified_base 87: mod_base = OTHER; note = 2'-O-methyl ribonucleotide
  modified_base 89: mod_base = OTHER; note = 2'-O-methyl ribonucleotide
  modified_base 92: mod_base = OTHER; note = 2'-O-methyl ribonucleotide
  modified_base 93: mod_base = OTHER; note = 2'-O-methyl ribonucleotide
  modified_base 94: mod_base = OTHER; note = 2'-O-methyl ribonucleotide
  modified_base 95: mod_base = OTHER; note = 2'-O-methyl ribonucleotide
  modified_base 96: mod_base = OTHER; note = 2'-O-methyl ribonucleotide
  modified_base 97: mod_base = OTHER; note = 2'-O-methyl ribonucleotide
  modified_base 98: mod_base = OTHER; note = 2'-O-methyl ribonucleotide
  modified_base 99: mod_base = OTHER; note = 2'-O-methyl ribonucleotide
  modified_base 100: mod_base = OTHER; note = 2'-O-methyl ribonucleotide
  modified_base 101: mod_base = OTHER; note = uniform ribonucleotides (A, C, G, inosine or U), deoxynucleotides (A, G, C, inosine or T), ribonebularine, 2'-O-methylnebularine or deoxynebularine
  modified_base 102: mod_base = OTHER; note = uniform ribonucleotides (A, C, G, inosine or U), deoxynucleotides (A, G, C, inosine or T), ribonebularine, 2'-O-methylnebularine or deoxynebularine
  modified_base 103: mod_base = OTHER; note = uniform ribonucleotides (A, C, G, inosine or U), deoxynucleotides (A, G, C, inosine or T), ribonebularine, 2'-O-methylnebularine or deoxynebularine
  modified_base 1..3: mod_base = OTHER; note = phosphorothioate linkage
  modified_base 25..26: mod_base = OTHER; note = phosphorothioate linkage
  modified_base 45..46: mod_base = OTHER; note = phosphorothioate linkage
  modified_base 64..65: mod_base = OTHER; note = phosphorothioate linkage
  modified_base 97..100: mod_base = OTHER; note = phosphorothioate linkage
  misc_feature 1..100: note = RNA
  misc_feature 101..103: note = Optionally DNA or RNA

SEQ ID NO: 2974 - DNA, 103 bp, synthetic construct; identical to SEQ ID NO: 1797
  source 1..103: mol_type = other DNA
  modified_base 1: mod_base = OTHER; note = 2'-O-methyl ribonucleotide
  modified_base 2: mod_base = OTHER; note = 2'-O-methyl ribonucleotide
  modified_base 3: mod_base = OTHER; note = 2'-O-methyl ribonucleotide
  modified_base 21: mod_base = OTHER; note = 2'-O-methyl ribonucleotide
  modified_base 28: mod_base = OTHER; note = 2'-O-methyl ribonucleotide
  modified_base 29: mod_base = OTHER; note = 2'-O-methyl ribonucleotide
  modified_base 30: mod_base = OTHER; note = 2'-O-methyl ribonucleotide
  modified_base 31: mod_base = OTHER; note = 2'-O-methyl ribonucleotide
  modified_base 32: mod_base = OTHER; note = 2'-O-methyl ribonucleotide
  modified_base 34: mod_base = OTHER; note = 2'-O-methyl ribonucleotide
  modified_base 35: mod_base = OTHER; note = 2'-O-methyl ribonucleotide
  modified_base 36: mod_base = OTHER; note = 2'-O-methyl ribonucleotide
  modified_base 37: mod_base = OTHER; note = 2'-O-methyl ribonucleotide
  modified_base 38: mod_base = OTHER; note = 2'-O-methyl ribonucleotide
  modified_base 39: mod_base = OTHER; note = 2'-O-methyl ribonucleotide
  modified_base 40: mod_base = OTHER; note = 2'-O-methyl ribonucleotide
  modified_base 41: mod_base = OTHER; note = 2'-O-methyl ribonucleotide
  modified_base 42: mod_base = OTHER; note = 2'-O-methyl ribonucleotide
  modified_base 46: mod_base = OTHER; note = 2'-O-methyl ribonucleotide
  modified_base 48: mod_base = OTHER; note = 2'-O-methyl ribonucleotide
  modified_base 50: mod_base = OTHER; note = 2'-O-methyl ribonucleotide
  modified_base 52: mod_base = OTHER; note = 2'-O-methyl ribonucleotide
  modified_base 53: mod_base = OTHER; note = 2'-O-methyl ribonucleotide
  modified_base 54: mod_base = OTHER; note = 2'-O-methyl ribonucleotide
  modified_base 57: mod_base = OTHER; note = 2'-O-methyl ribonucleotide
  modified_base 61: mod_base = OTHER; note = 2'-O-methyl ribonucleotide
  modified_base 66: mod_base = OTHER; note = 2'-O-methyl ribonucleotide
  modified_base 67: mod_base = OTHER; note = 2'-O-methyl ribonucleotide
  modified_base 70: mod_base = OTHER; note = 2'-O-methyl ribonucleotide
  modified_base 71: mod_base = OTHER; note = 2'-O-methyl ribonucleotide
  modified_base 72: mod_base = OTHER; note = 2'-O-methyl ribonucleotide
  modified_base 73: mod_base = OTHER; note = 2'-O-methyl ribonucleotide
  modified_base 74: mod_base = OTHER; note = 2'-O-methyl ribonucleotide
  modified_base 75: mod_base = OTHER; note = 2'-O-methyl ribonucleotide
  modified_base 76: mod_base = OTHER; note = 2'-O-methyl ribonucleotide
  modified_base 77: mod_base = OTHER; note = 2'-O-methyl ribonucleotide
  modified_base 78: mod_base = OTHER; note = 2'-O-methyl ribonucleotide
  modified_base 79: mod_base = OTHER; note = 2'-O-methyl ribonucleotide
  modified_base 80: mod_base = OTHER; note = 2'-O-methyl ribonucleotide
  modified_base 82: mod_base = OTHER; note = 2'-O-methyl ribonucleotide
  modified_base 83: mod_base = OTHER; note = 2'-O-methyl ribonucleotide
  modified_base 84: mod_base = OTHER; note = 2'-O-methyl ribonucleotide
  modified_base 85: mod_base = OTHER; note = 2'-O-methyl ribonucleotide
  modified_base 86: mod_base = OTHER; note = 2'-O-methyl ribonucleotide
  modified_base 87: mod_base = OTHER; note = 2'-O-methyl ribonucleotide
  modified_base 89: mod_base = OTHER; note = 2'-O-methyl ribonucleotide
  modified_base 91: mod_base = OTHER; note = 2'-O-methyl ribonucleotide
  modified_base 92: mod_base = OTHER; note = 2'-O-methyl ribonucleotide
  modified_base 93: mod_base = OTHER; note = 2'-O-methyl ribonucleotide
  modified_base 94: mod_base = OTHER; note = 2'-O-methyl ribonucleotide
  modified_base 95: mod_base = OTHER; note = 2'-O-methyl ribonucleotide
  modified_base 96: mod_base = OTHER; note = 2'-O-methyl ribonucleotide
  modified_base 97: mod_base = OTHER; note = 2'-O-methyl ribonucleotide
  modified_base 98: mod_base = OTHER; note = 2'-O-methyl ribonucleotide
  modified_base 99: mod_base = OTHER; note = 2'-O-methyl ribonucleotide
  modified_base 100: mod_base = OTHER; note = 2'-O-methyl ribonucleotide
  modified_base 101: mod_base = OTHER; note = uniform ribonucleotides (A, C, G, inosine or U), deoxynucleotides (A, G, C, inosine or T), ribonebularine, 2'-O-methylnebularine or deoxynebularine
  modified_base 102: mod_base = OTHER; note = uniform ribonucleotides (A, C, G, inosine or U), deoxynucleotides (A, G, C, inosine or T), ribonebularine, 2'-O-methylnebularine or deoxynebularine
  modified_base 103: mod_base = OTHER; note = uniform ribonucleotides (A, C, G, inosine or U), deoxynucleotides (A, G, C, inosine or T), ribonebularine, 2'-O-methylnebularine or deoxynebularine
  modified_base 1..3: mod_base = OTHER; note = phosphorothioate linkage
  modified_base 25..26: mod_base = OTHER; note = phosphorothioate linkage
  modified_base 45..46: mod_base = OTHER; note = phosphorothioate linkage
  modified_base 64..65: mod_base = OTHER; note = phosphorothioate linkage
  modified_base 97..100: mod_base = OTHER; note = phosphorothioate linkage
  misc_feature 1..100: note = RNA
  misc_feature 101..103: note = Optionally DNA or RNA

SEQ ID NO: 2975 - DNA, 103 bp, synthetic construct; identical to SEQ ID NO: 1797
  source 1..103: mol_type = other DNA
  modified_base 1: mod_base = OTHER; note = 2'-O-methyl ribonucleotide
  modified_base 2: mod_base = OTHER; note = 2'-O-methyl ribonucleotide
  modified_base 3: mod_base = OTHER; note = 2'-O-methyl ribonucleotide
  modified_base 21: mod_base = OTHER; note = 2'-O-methyl ribonucleotide
  modified_base 28: mod_base = OTHER; note = 2'-O-methyl ribonucleotide
  modified_base 29: mod_base = OTHER; note = 2'-O-methyl ribonucleotide
  modified_base 30: mod_base = OTHER; note = 2'-O-methyl ribonucleotide
  modified_base 31: mod_base = OTHER; note = 2'-O-methyl ribonucleotide
  modified_base 32: mod_base = OTHER; note = 2'-O-methyl ribonucleotide
  modified_base 34: mod_base = OTHER; note = 2'-O-methyl ribonucleotide
  modified_base 35: mod_base = OTHER; note = 2'-O-methyl ribonucleotide
  modified_base 36: mod_base = OTHER; note = 2'-O-methyl ribonucleotide
  modified_base 37: mod_base = OTHER; note = 2'-O-methyl ribonucleotide
  modified_base 38: mod_base = OTHER; note = 2'-O-methyl ribonucleotide
  modified_base 39: mod_base = OTHER; note = 2'-O-methyl ribonucleotide
  modified_base 40: mod_base = OTHER; note = 2'-O-methyl ribonucleotide
  modified_base 41: mod_base = OTHER; note = 2'-O-methyl ribonucleotide
  modified_base 42: mod_base = OTHER; note = 2'-O-methyl ribonucleotide
  modified_base 46: mod_base = OTHER; note = 2'-O-methyl ribonucleotide
  modified_base 48: mod_base = OTHER; note = 2'-O-methyl ribonucleotide
  modified_base 50: mod_base = OTHER; note = 2'-O-methyl ribonucleotide
  modified_base 52: mod_base = OTHER; note = 2'-O-methyl ribonucleotide
  modified_base 53: mod_base = OTHER; note = 2'-O-methyl ribonucleotide
  modified_base 54: mod_base = OTHER; note = 2'-O-methyl ribonucleotide
  modified_base 55: mod_base = OTHER; note = 2'-O-methyl ribonucleotide
  modified_base 56: mod_base = OTHER; note = 2'-O-methyl ribonucleotide
  modified_base 57: mod_base = OTHER; note = 2'-O-methyl ribonucleotide
  modified_base 60: mod_base = OTHER; note = 2'-O-methyl ribonucleotide
  modified_base 61: mod_base = OTHER; note = 2'-O-methyl ribonucleotide
  modified_base 66: mod_base = OTHER; note = 2'-O-methyl ribonucleotide
  modified_base 67: mod_base = OTHER; note = 2'-O-methyl ribonucleotide
  modified_base 70: mod_base = OTHER; note = 2'-O-methyl ribonucleotide
  modified_base 71: mod_base = OTHER; note = 2'-O-methyl ribonucleotide
  modified_base 72: mod_base = OTHER; note = 2'-O-methyl ribonucleotide
  modified_base 74: mod_base = OTHER; note = 2'-O-methyl ribonucleotide
  modified_base 75: mod_base = OTHER; note = 2'-O-methyl ribonucleotide
  modified_base 76: mod_base = OTHER; note = 2'-O-methyl ribonucleotide
  modified_base 77: mod_base = OTHER; note = 2'-O-methyl ribonucleotide
  modified_base 78: mod_base = OTHER; note = 2'-O-methyl ribonucleotide
  modified_base 79: mod_base = OTHER; note = 2'-O-methyl ribonucleotide
  modified_base 80: mod_base = OTHER; note = 2'-O-methyl ribonucleotide
  modified_base 82: mod_base = OTHER; note = 2'-O-methyl ribonucleotide
  modified_base 83: mod_base = OTHER; note = 2'-O-methyl ribonucleotide
  modified_base 84: mod_base = OTHER; note = 2'-O-methyl ribonucleotide
  modified_base 85: mod_base = OTHER; note = 2'-O-methyl ribonucleotide
  modified_base 86: mod_base = OTHER; note = 2'-O-methyl ribonucleotide
  modified_base 87: mod_base = OTHER; note = 2'-O-methyl ribonucleotide
  modified_base 89: mod_base = OTHER; note = 2'-O-methyl ribonucleotide
  modified_base 92: mod_base = OTHER; note = 2'-O-methyl ribonucleotide
  modified_base 93: mod_base = OTHER; note = 2'-O-methyl ribonucleotide
  modified_base 94: mod_base = OTHER; note = 2'-O-methyl ribonucleotide
  modified_base 95: mod_base = OTHER; note = 2'-O-methyl ribonucleotide
  modified_base 96: mod_base = OTHER; note = 2'-O-methyl ribonucleotide
  modified_base 97: mod_base = OTHER; note = 2'-O-methyl ribonucleotide
  modified_base 98: mod_base = OTHER; note = 2'-O-methyl ribonucleotide
  modified_base 99: mod_base = OTHER; note = 2'-O-methyl ribonucleotide
  modified_base 100: mod_base = OTHER; note = 2'-O-methyl ribonucleotide
  modified_base 101: mod_base = OTHER; note = uniform ribonucleotides (A, C, G, inosine or U), deoxynucleotides (A, G, C, inosine or T), ribonebularine, 2'-O-methylnebularine or deoxynebularine
  modified_base 102: mod_base = OTHER; note = uniform ribonucleotides (A, C, G, inosine or U), deoxynucleotides (A, G, C, inosine or T), ribonebularine, 2'-O-methylnebularine or deoxynebularine
  modified_base 103: mod_base = OTHER; note = uniform ribonucleotides (A, C, G, inosine or U), deoxynucleotides (A, G, C, inosine or T), ribonebularine, 2'-O-methylnebularine or deoxynebularine
  modified_base 1..3: mod_base = OTHER; note = phosphorothioate linkage
  modified_base 25..26: mod_base = OTHER; note = phosphorothioate linkage
  modified_base 45..46: mod_base = OTHER; note = phosphorothioate linkage
  modified_base 64..65: mod_base = OTHER; note = phosphorothioate linkage
  modified_base 97..100: mod_base = OTHER; note = phosphorothioate linkage
  misc_feature 1..100: note = RNA
  misc_feature 101..103: note = Optionally DNA or RNA

SEQ ID NO: 2976 - DNA, 103 bp, synthetic construct; identical to SEQ ID NO: 1797
  source 1..103: mol_type = other DNA
  modified_base 1: mod_base = OTHER; note = 2'-O-methyl ribonucleotide
  modified_base 2: mod_base = OTHER; note = 2'-O-methyl ribonucleotide
  modified_base 3: mod_base = OTHER; note = 2'-O-methyl ribonucleotide
  modified_base 21: mod_base = OTHER; note = 2'-O-methyl ribonucleotide
  modified_base 28: mod_base = OTHER; note = 2'-O-methyl ribonucleotide
  modified_base 29: mod_base = OTHER; note = 2'-O-methyl ribonucleotide
  modified_base 30: mod_base = OTHER; note = 2'-O-methyl ribonucleotide
  modified_base 31: mod_base = OTHER; note = 2'-O-methyl ribonucleotide
  modified_base 32: mod_base = OTHER; note = 2'-O-methyl ribonucleotide
  modified_base 34: mod_base = OTHER; note = 2'-O-methyl ribonucleotide
  modified_base 35: mod_base = OTHER; note = 2'-O-methyl ribonucleotide
  modified_base 36: mod_base = OTHER; note = 2'-O-methyl ribonucleotide
  modified_base 37: mod_base = OTHER; note = 2'-O-methyl ribonucleotide
  modified_base 38: mod_base = OTHER; note = 2'-O-methyl ribonucleotide
  modified_base 39: mod_base = OTHER; note = 2'-O-methyl ribonucleotide
  modified_base 40: mod_base = OTHER; note = 2'-O-methyl ribonucleotide
  modified_base 41: mod_base = OTHER; note = 2'-O-methyl ribonucleotide
  modified_base 42: mod_base = OTHER; note = 2'-O-methyl ribonucleotide
  modified_base 46: mod_base = OTHER; note = 2'-O-methyl ribonucleotide
  modified_base 48: mod_base = OTHER; note = 2'-O-methyl ribonucleotide
  modified_base 50: mod_base = OTHER; note = 2'-O-methyl ribonucleotide
  modified_base 52: mod_base = OTHER; note = 2'-O-methyl ribonucleotide
  modified_base 53: mod_base = OTHER; note = 2'-O-methyl ribonucleotide
  modified_base 54: mod_base = OTHER; note = 2'-O-methyl ribonucleotide
  modified_base 55: mod_base = OTHER; note = 2'-O-methyl ribonucleotide
  modified_base 56: mod_base = OTHER; note = 2'-O-methyl ribonucleotide
  modified_base 57: mod_base = OTHER; note = 2'-O-methyl ribonucleotide
  modified_base 60: mod_base = OTHER; note = 2'-O-methyl ribonucleotide
  modified_base 61: mod_base = OTHER; note = 2'-O-methyl ribonucleotide
  modified_base 66: mod_base = OTHER; note = 2'-O-methyl ribonucleotide
  modified_base 67: mod_base = OTHER; note = 2'-O-methyl ribonucleotide
  modified_base 70: mod_base = OTHER; note = 2'-O-methyl ribonucleotide
  modified_base 71: mod_base = OTHER; note = 2'-O-methyl ribonucleotide
  modified_base 72: mod_base = OTHER; note = 2'-O-methyl ribonucleotide
  modified_base 74: mod_base = OTHER; note = 2'-O-methyl ribonucleotide
  modified_base 75: mod_base = OTHER; note = 2'-O-methyl ribonucleotide
  modified_base 76: mod_base = OTHER; note = 2'-O-methyl ribonucleotide
  modified_base 77: mod_base = OTHER; note = 2'-O-methyl ribonucleotide
  modified_base 78: mod_base = OTHER; note = 2'-O-methyl ribonucleotide
  modified_base 79: mod_base = OTHER; note = 2'-O-methyl ribonucleotide
  modified_base 80: mod_base = OTHER; note = 2'-O-methyl ribonucleotide
  modified_base 81: mod_base = OTHER; note = 2'-O-methyl ribonucleotide
  modified_base 83: mod_base = OTHER; note = 2'-O-methyl ribonucleotide
  modified_base 84: mod_base = OTHER; note = 2'-O-methyl ribonucleotide
  modified_base 85: mod_base = OTHER; note = 2'-O-methyl ribonucleotide
  modified_base 86: mod_base = OTHER; note = 2'-O-methyl ribonucleotide
  modified_base 87: mod_base = OTHER; note = 2'-O-methyl ribonucleotide
  modified_base 88: mod_base = OTHER; note = 2'-O-methyl ribonucleotide
  modified_base 89: mod_base = OTHER; note = 2'-O-methyl ribonucleotide
  modified_base 90: mod_base = OTHER; note = 2'-O-methyl ribonucleotide
  modified_base 91: mod_base = OTHER; note = 2'-O-methyl ribonucleotide
  modified_base 92: mod_base = OTHER; note = 2'-O-methyl ribonucleotide
  modified_base 93: mod_base = OTHER; note = 2'-O-methyl ribonucleotide
  modified_base 94: mod_base = OTHER; note = 2'-O-methyl ribonucleotide
  modified_base 95: mod_base = OTHER; note = 2'-O-methyl ribonucleotide
  modified_base 96: mod_base = OTHER; note = 2'-O-methyl ribonucleotide
  modified_base 97: mod_base = OTHER; note = 2'-O-methyl ribonucleotide
  modified_base 98: mod_base = OTHER; note = 2'-O-methyl ribonucleotide
  modified_base 99: mod_base = OTHER; note = 2'-O-methyl ribonucleotide
  modified_base 100: mod_base = OTHER; note = 2'-O-methyl ribonucleotide
  modified_base 101: mod_base = OTHER; note = uniform ribonucleotides (A, C, G, inosine or U), deoxynucleotides (A, G, C, inosine or T), ribonebularine, 2'-O-methylnebularine or deoxynebularine
  modified_base 102: mod_base = OTHER; note = uniform ribonucleotides (A, C, G, inosine or U), deoxynucleotides (A, G, C, inosine or T), ribonebularine, 2'-O-methylnebularine or deoxynebularine
  modified_base 103: mod_base = OTHER; note = uniform ribonucleotides (A, C, G, inosine or U), deoxynucleotides (A, G, C, inosine or T), ribonebularine, 2'-O-methylnebularine or deoxynebularine
  modified_base 1..4: mod_base = OTHER; note = phosphorothioate linkage
  modified_base 98..100: mod_base = OTHER; note = phosphorothioate linkage
  misc_feature 1..100: note = RNA
  misc_feature 101..103: note = Optionally DNA or RNA

SEQ ID NO: 2977 - DNA, 103 bp, synthetic construct; identical to SEQ ID NO: 1797
  source 1..103: mol_type = other DNA
  modified_base 1: mod_base = OTHER; note = 2'-O-methyl ribonucleotide
  modified_base 2: mod_base = OTHER; note = 2'-O-methyl ribonucleotide
  modified_base 3: mod_base = OTHER; note = 2'-O-methyl ribonucleotide
  modified_base 21: mod_base = OTHER; note = 2'-O-methyl ribonucleotide
  modified_base 28: mod_base = OTHER; note = 2'-O-methyl ribonucleotide
  modified_base 29: mod_base = OTHER; note = 2'-O-methyl ribonucleotide
  modified_base 30: mod_base = OTHER; note = 2'-O-methyl ribonucleotide
  modified_base 31: mod_base = OTHER; note = 2'-O-methyl ribonucleotide
  modified_base 32: mod_base = OTHER; note = 2'-O-methyl ribonucleotide
  modified_base 33: mod_base = OTHER; note = 2'-O-methyl ribonucleotide
  modified_base 34: mod_base = OTHER; note = 2'-O-methyl ribonucleotide
  modified_base 35: mod_base = OTHER; note = 2'-O-methyl ribonucleotide
  modified_base 36: mod_base = OTHER; note = 2'-O-methyl ribonucleotide
  modified_base 37: mod_base = OTHER; note = 2'-O-methyl ribonucleotide
  modified_base 38: mod_base = OTHER; note = 2'-O-methyl ribonucleotide
  modified_base 39: mod_base = OTHER; note = 2'-O-methyl ribonucleotide
  modified_base 40: mod_base = OTHER; note = 2'-O-methyl ribonucleotide
  modified_base 41: mod_base = OTHER; note = 2'-O-methyl ribonucleotide
  modified_base 42: mod_base = OTHER; note = 2'-O-methyl ribonucleotide
  modified_base 46: mod_base = OTHER; note = 2'-O-methyl ribonucleotide
  modified_base 48: mod_base = OTHER; note = 2'-O-methyl ribonucleotide
  modified_base 50: mod_base = OTHER; note = 2'-O-methyl ribonucleotide
  modified_base 52: mod_base = OTHER; note = 2'-O-methyl ribonucleotide
  modified_base 53: mod_base = OTHER; note = 2'-O-methyl ribonucleotide
  modified_base 54: mod_base = OTHER; note = 2'-O-methyl ribonucleotide
  modified_base 57: mod_base = OTHER; note = 2'-O-methyl ribonucleotide
  modified_base 61: mod_base = OTHER; note = 2'-O-methyl ribonucleotide
  modified_base 66: mod_base = OTHER; note = 2'-O-methyl ribonucleotide
  modified_base 67: mod_base = OTHER; note = 2'-O-methyl ribonucleotide
  modified_base 70: mod_base = OTHER; note = 2'-O-methyl ribonucleotide
  modified_base 71: mod_base = OTHER; note = 2'-O-methyl ribonucleotide
  modified_base 72: mod_base = OTHER; note = 2'-O-methyl ribonucleotide
  modified_base 74: mod_base = OTHER; note = 2'-O-methyl ribonucleotide
  modified_base 75: mod_base = OTHER; note = 2'-O-methyl ribonucleotide
  modified_base 76: mod_base = OTHER; note = 2'-O-methyl ribonucleotide
  modified_base 77: mod_base = OTHER; note = 2'-O-methyl ribonucleotide
  modified_base 78: mod_base = OTHER; note = 2'-O-methyl ribonucleotide
  modified_base 79: mod_base = OTHER; note = 2'-O-methyl ribonucleotide
  modified_base 80: mod_base = OTHER; note = 2'-O-methyl ribonucleotide
  modified_base 82: mod_base = OTHER; note = 2'-O-methyl ribonucleotide
  modified_base 83: mod_base = OTHER; note = 2'-O-methyl ribonucleotide
  modified_base 84: mod_base = OTHER; note = 2'-O-methyl ribonucleotide
  modified_base 85: mod_base = OTHER; note = 2'-O-methyl ribonucleotide
  modified_base 86: mod_base = OTHER; note = 2'-O-methyl ribonucleotide
  modified_base 87: mod_base = OTHER; note = 2'-O-methyl ribonucleotide
  modified_base 89: mod_base = OTHER; note = 2'-O-methyl ribonucleotide
  modified_base 92: mod_base = OTHER; note = 2'-O-methyl ribonucleotide
  modified_base 93: mod_base = OTHER; note = 2'-O-methyl ribonucleotide
  modified_base 94: mod_base = OTHER; note = 2'-O-methyl ribonucleotide
  modified_base 95: mod_base = OTHER; note = 2'-O-methyl ribonucleotide
  modified_base 96: mod_base = OTHER; note = 2'-O-methyl ribonucleotide
  modified_base 97: mod_base = OTHER; note = 2'-O-methyl ribonucleotide
  modified_base 98: mod_base = OTHER; note = 2'-O-methyl ribonucleotide
  modified_base 99: mod_base = OTHER; note = 2'-O-methyl ribonucleotide
  modified_base 100: mod_base = OTHER; note = 2'-O-methyl ribonucleotide
  modified_base 101: mod_base = OTHER; note = uniform ribonucleotides (A, C, G, inosine or U), deoxynucleotides (A, G, C, inosine or T), ribonebularine, 2'-O-methylnebularine or deoxynebularine
  modified_base 102: mod_base = OTHER; note = uniform ribonucleotides (A, C, G, inosine or U), deoxynucleotides (A, G, C, inosine or T), ribonebularine, 2'-O-methylnebularine or deoxynebularine
  modified_base 103: mod_base = OTHER; note = uniform ribonucleotides (A, C, G, inosine or U), deoxynucleotides (A, G, C, inosine or T), ribonebularine, 2'-O-methylnebularine or deoxynebularine
  modified_base 1..4: mod_base = OTHER; note = phosphorothioate linkage
  modified_base 98..100: mod_base = OTHER; note = phosphorothioate linkage
  misc_feature 1..100: note = RNA
  misc_feature 101..103: note = Optionally DNA or RNA

SEQ ID NO: 2978 - DNA, 103 bp, synthetic construct; identical to SEQ ID NO: 1797
  source 1..103: mol_type = other DNA
  modified_base 1: mod_base = OTHER; note = 2'-O-methyl ribonucleotide
  modified_base 2: mod_base = OTHER; note = 2'-O-methyl ribonucleotide
  modified_base 3: mod_base = OTHER; note = 2'-O-methyl ribonucleotide
  modified_base 21: mod_base = OTHER; note = 2'-O-methyl ribonucleotide
  modified_base 28: mod_base = OTHER; note = 2'-O-methyl ribonucleotide
  modified_base 29: mod_base = OTHER; note = 2'-O-methyl ribonucleotide
  modified_base 30: mod_base = OTHER; note = 2'-O-methyl ribonucleotide
  modified_base 31: mod_base = OTHER; note = 2'-O-methyl ribonucleotide
  modified_base 32: mod_base = OTHER; note = 2'-O-methyl ribonucleotide
  modified_base 33: mod_base = OTHER; note = 2'-O-methyl ribonucleotide
  modified_base 34: mod_base = OTHER; note = 2'-O-methyl ribonucleotide
  modified_base 35: mod_base = OTHER; note = 2'-O-methyl ribonucleotide
  modified_base 36: mod_base = OTHER; note = 2'-O-methyl ribonucleotide
  modified_base 37: mod_base = OTHER; note = 2'-O-methyl ribonucleotide
  modified_base 38: mod_base = OTHER; note = 2'-O-methyl ribonucleotide
  modified_base 39: mod_base = OTHER; note = 2'-O-methyl ribonucleotide
  modified_base 40: mod_base = OTHER; note = 2'-O-methyl ribonucleotide
  modified_base 41: mod_base = OTHER; note = 2'-O-methyl ribonucleotide
  modified_base 42: mod_base = OTHER; note = 2'-O-methyl ribonucleotide
  modified_base 46: mod_base = OTHER; note = 2'-O-methyl ribonucleotide
  modified_base 48: mod_base = OTHER; note = 2'-O-methyl ribonucleotide
  modified_base 50: mod_base = OTHER; note = 2'-O-methyl ribonucleotide
  modified_base 52: mod_base = OTHER; note = 2'-O-methyl ribonucleotide
  modified_base 53: mod_base = OTHER; note = 2'-O-methyl ribonucleotide
  modified_base 54: mod_base = OTHER; note = 2'-O-methyl ribonucleotide
  modified_base 55: mod_base = OTHER; note = 2'-O-methyl ribonucleotide
  modified_base 56: mod_base = OTHER; note = 2'-O-methyl ribonucleotide
  modified_base 57: mod_base = OTHER; note = 2'-O-methyl ribonucleotide
  modified_base 60: mod_base = OTHER; note = 2'-O-methyl ribonucleotide
  modified_base 61: mod_base = OTHER; note = 2'-O-methyl ribonucleotide
  modified_base 66: mod_base = OTHER; note = 2'-O-methyl ribonucleotide
  modified_base 67: mod_base = OTHER; note = 2'-O-methyl ribonucleotide
  modified_base 70: mod_base = OTHER; note = 2'-O-methyl ribonucleotide
  modified_base 71: mod_base = OTHER; note = 2'-O-methyl ribonucleotide
  modified_base 72: mod_base = OTHER; note = 2'-O-methyl ribonucleotide
  modified_base 74: mod_base = OTHER; note = 2'-O-methyl ribonucleotide
  modified_base 75: mod_base = OTHER; note = 2'-O-methyl ribonucleotide
  modified_base 76: mod_base = OTHER; note = 2'-O-methyl ribonucleotide
  modified_base 77: mod_base = OTHER; note = 2'-O-methyl ribonucleotide
  modified_base 78: mod_base = OTHER; note = 2'-O-methyl ribonucleotide
  modified_base 79: mod_base = OTHER; note = 2'-O-methyl ribonucleotide
  modified_base 80: mod_base = OTHER; note = 2'-O-methyl ribonucleotide
  modified_base 82: mod_base = OTHER; note = 2'-O-methyl ribonucleotide
  modified_base 83: mod_base = OTHER; note = 2'-O-methyl ribonucleotide
  modified_base 84: mod_base = OTHER; note = 2'-O-methyl ribonucleotide
  modified_base 85: mod_base = OTHER; note = 2'-O-methyl ribonucleotide
  modified_base 86: mod_base = OTHER; note = 2'-O-methyl ribonucleotide
  modified_base 87: mod_base = OTHER; note = 2'-O-methyl ribonucleotide
  modified_base 89: mod_base = OTHER; note = 2'-O-methyl ribonucleotide
  modified_base 92: mod_base = OTHER; note = 2'-O-methyl ribonucleotide
  modified_base 93: mod_base = OTHER; note = 2'-O-methyl ribonucleotide
  modified_base 94: mod_base = OTHER; note = 2'-O-methyl ribonucleotide
  modified_base 95: mod_base = OTHER; note = 2'-O-methyl ribonucleotide
  modified_base 96: mod_base = OTHER; note = 2'-O-methyl ribonucleotide
  modified_base 97: mod_base = OTHER; note = 2'-O-methyl ribonucleotide
  modified_base 98: mod_base = OTHER; note = 2'-O-methyl ribonucleotide
  modified_base 99: mod_base = OTHER; note = 2'-O-methyl ribonucleotide
  modified_base 100: mod_base = OTHER; note = 2'-O-methyl ribonucleotide
  modified_base 101: mod_base = OTHER; note = uniform ribonucleotides (A, C, G, inosine or U), deoxynucleotides (A, G, C, inosine or T), ribonebularine, 2'-O-methylnebularine or deoxynebularine
  modified_base 102: mod_base = OTHER; note = uniform ribonucleotides (A, C, G, inosine or U), deoxynucleotides (A, G, C, inosine or T), ribonebularine, 2'-O-methylnebularine or deoxynebularine
  modified_base 103: mod_base = OTHER; note = uniform ribonucleotides (A, C, G, inosine or U), deoxynucleotides (A, G, C, inosine or T), ribonebularine, 2'-O-methylnebularine or deoxynebularine
  modified_base 1..4: mod_base = OTHER; note = phosphorothioate linkage
  modified_base 98..100: mod_base = OTHER; note = phosphorothioate linkage
  misc_feature 1..100: note = RNA
  misc_feature 101..103: note = Optionally DNA or RNA

SEQ ID NO: 2979 - DNA, 103 bp, synthetic construct; identical to SEQ ID NO: 1797
  source 1..103: mol_type = other DNA
  modified_base 1: mod_base = OTHER; note = 2'-O-methyl ribonucleotide
  modified_base 2: mod_base = OTHER; note = 2'-O-methyl ribonucleotide
  modified_base 3: mod_base = OTHER; note = 2'-O-methyl ribonucleotide
  modified_base 21: mod_base = OTHER; note = 2'-O-methyl ribonucleotide
  modified_base 28: mod_base = OTHER; note = 2'-O-methyl ribonucleotide
  modified_base 29: mod_base = OTHER; note = 2'-O-methyl ribonucleotide
  modified_base 30: mod_base = OTHER; note = 2'-O-methyl ribonucleotide
  modified_base 31: mod_base = OTHER; note = 2'-O-methyl ribonucleotide
  modified_base 32: mod_base = OTHER; note = 2'-O-methyl ribonucleotide
  modified_base 33: mod_base = OTHER; note = 2'-O-methyl ribonucleotide
  modified_base 34: mod_base = OTHER; note = 2'-O-methyl ribonucleotide
  modified_base 35: mod_base = OTHER; note = 2'-O-methyl ribonucleotide
  modified_base 36: mod_base = OTHER; note = 2'-O-methyl ribonucleotide
  modified_base 37: mod_base = OTHER; note = 2'-O-methyl ribonucleotide
  modified_base 38: mod_base = OTHER; note = 2'-O-methyl ribonucleotide
  modified_base 39: mod_base = OTHER; note = 2'-O-methyl ribonucleotide
  modified_base 40: mod_base = OTHER; note = 2'-O-methyl ribonucleotide
  modified_base 41: mod_base = OTHER; note = 2'-O-methyl ribonucleotide
  modified_base 42: mod_base = OTHER; note = 2'-O-methyl ribonucleotide
  modified_base 46: mod_base = OTHER; note = 2'-O-methyl ribonucleotide
  modified_base 48: mod_base = OTHER; note = 2'-O-methyl ribonucleotide
  modified_base 50: mod_base = OTHER; note = 2'-O-methyl ribonucleotide
  modified_base 52: mod_base = OTHER; note = 2'-O-methyl ribonucleotide
  modified_base 53: mod_base = OTHER; note = 2'-O-methyl ribonucleotide
  modified_base 54: mod_base = OTHER; note = 2'-O-methyl ribonucleotide
  modified_base 57: mod_base = OTHER; note = 2'-O-methyl ribonucleotide
  modified_base 61: mod_base = OTHER; note = 2'-O-methyl ribonucleotide
  modified_base 66: mod_base = OTHER; note = 2'-O-methyl ribonucleotide
  modified_base 67: mod_base = OTHER; note = 2'-O-methyl ribonucleotide
  modified_base 70: mod_base = OTHER; note = 2'-O-methyl ribonucleotide
  modified_base 71: mod_base = OTHER; note = 2'-O-methyl ribonucleotide
  modified_base 72: mod_base = OTHER; note = 2'-O-methyl ribonucleotide
  modified_base 73: mod_base = OTHER; note = 2'-O-methyl ribonucleotide
  modified_base 74: mod_base = OTHER; note = 2'-O-methyl ribonucleotide
  modified_base 75: mod_base = OTHER; note = 2'-O-methyl ribonucleotide
  modified_base 76: mod_base = OTHER; note = 2'-O-methyl ribonucleotide
  modified_base 77: mod_base = OTHER; note = 2'-O-methyl ribonucleotide
  modified_base 78: mod_base = OTHER; note = 2'-O-methyl ribonucleotide
  modified_base 79: mod_base = OTHER; note = 2'-O-methyl ribonucleotide
  modified_base 80: mod_base = OTHER; note = 2'-O-methyl ribonucleotide
  modified_base 82: mod_base = OTHER; note = 2'-O-methyl ribonucleotide
  modified_base 83: mod_base = OTHER; note = 2'-O-methyl ribonucleotide
  modified_base 84: mod_base = OTHER; note = 2'-O-methyl ribonucleotide
  modified_base 85: mod_base = OTHER; note = 2'-O-methyl ribonucleotide
  modified_base 86: mod_base = OTHER; note = 2'-O-methyl ribonucleotide
  modified_base 87: mod_base = OTHER; note = 2'-O-methyl ribonucleotide
  modified_base 89: mod_base = OTHER; note = 2'-O-methyl ribonucleotide
  modified_base 92: mod_base = OTHER; note = 2'-O-methyl ribonucleotide
  modified_base 93: mod_base = OTHER; note = 2'-O-methyl ribonucleotide
  modified_base 94: mod_base = OTHER; note = 2'-O-methyl ribonucleotide
  modified_base 95: mod_base = OTHER; note = 2'-O-methyl ribonucleotide
  modified_base 96: mod_base = OTHER; note = 2'-O-methyl ribonucleotide
  modified_base 97: mod_base = OTHER; note = 2'-O-methyl ribonucleotide
  modified_base 98: mod_base = OTHER; note = 2'-O-methyl ribonucleotide
  modified_base 99: mod_base = OTHER; note = 2'-O-methyl ribonucleotide
  modified_base 100: mod_base = OTHER; note = 2'-O-methyl ribonucleotide
  modified_base 101: mod_base = OTHER; note = uniform ribonucleotides (A, C, G, inosine or U), deoxynucleotides (A, G, C, inosine or T), ribonebularine, 2'-O-methylnebularine or deoxynebularine
  modified_base 102: mod_base = OTHER; note = uniform ribonucleotides (A, C, G, inosine or U), deoxynucleotides (A, G, C, inosine or T), ribonebularine, 2'-O-methylnebularine or deoxynebularine
  modified_base 103: mod_base = OTHER; note = uniform ribonucleotides (A, C, G, inosine or U), deoxynucleotides (A, G, C, inosine or T), ribonebularine, 2'-O-methylnebularine or deoxynebularine
  modified_base 1..4: mod_base = OTHER; note = phosphorothioate linkage
  modified_base 98..100: mod_base = OTHER; note = phosphorothioate linkage
  misc_feature 1..100: note = RNA
  misc_feature 101..103: note = Optionally DNA or RNA

SEQ ID NO: 2980 - DNA, 103 bp, synthetic construct; identical to SEQ ID NO: 1797
  source 1..103: mol_type = other DNA
  modified_base 1: mod_base = OTHER; note = 2'-O-methyl ribonucleotide
  modified_base 2: mod_base = OTHER; note = 2'-O-methyl ribonucleotide
  modified_base 3: mod_base = OTHER; note = 2'-O-methyl ribonucleotide
  modified_base 21: mod_base = OTHER; note = 2'-O-methyl ribonucleotide
  modified_base 28: mod_base = OTHER; note = 2'-O-methyl ribonucleotide
  modified_base 29: mod_base = OTHER; note = 2'-O-methyl ribonucleotide
  modified_base 30: mod_base = OTHER; note = 2'-O-methyl ribonucleotide
  modified_base 31: mod_base = OTHER; note = 2'-O-methyl ribonucleotide
  modified_base 32: mod_base = OTHER; note = 2'-O-methyl ribonucleotide
  modified_base 33: mod_base = OTHER; note = 2'-O-methyl ribonucleotide
  modified_base 34: mod_base = OTHER; note = 2'-O-methyl ribonucleotide
  modified_base 35: mod_base = OTHER; note = 2'-O-methyl ribonucleotide
  modified_base 36: mod_base = OTHER; note = 2'-O-methyl ribonucleotide
  modified_base 37: mod_base = OTHER; note = 2'-O-methyl ribonucleotide
  modified_base 38: mod_base = OTHER; note = 2'-O-methyl ribonucleotide
  modified_base 39: mod_base = OTHER; note = 2'-O-methyl ribonucleotide
  modified_base 40: mod_base = OTHER; note = 2'-O-methyl ribonucleotide
  modified_base 41: mod_base = OTHER; note = 2'-O-methyl ribonucleotide
  modified_base 42: mod_base = OTHER; note = 2'-O-methyl ribonucleotide
  modified_base 46: mod_base = OTHER; note = 2'-O-methyl ribonucleotide
  modified_base 48: mod_base = OTHER; note = 2'-O-methyl ribonucleotide
  modified_base 50: mod_base = OTHER; note = 2'-O-methyl ribonucleotide
  modified_base 52: mod_base = OTHER; note = 2'-O-methyl ribonucleotide
  modified_base 53: mod_base = OTHER; note = 2'-O-methyl ribonucleotide
  modified_base 54: mod_base = OTHER; note = 2'-O-methyl ribonucleotide
  modified_base 57: mod_base = OTHER; note = 2'-O-methyl ribonucleotide
  modified_base 61: mod_base = OTHER; note = 2'-O-methyl ribonucleotide
  modified_base 66: mod_base = OTHER; note = 2'-O-methyl ribonucleotide
  modified_base 67: mod_base = OTHER; note = 2'-O-methyl ribonucleotide
  modified_base 70: mod_base = OTHER; note = 2'-O-methyl ribonucleotide
  modified_base 71: mod_base = OTHER; note = 2'-O-methyl ribonucleotide
  modified_base 72: mod_base = OTHER; note = 2'-O-methyl ribonucleotide
  modified_base 73: mod_base = OTHER; note = 2'-O-methyl ribonucleotide
  modified_base 74: mod_base = OTHER; note = 2'-O-methyl ribonucleotide
  modified_base 75: mod_base = OTHER; note = 2'-O-methyl ribonucleotide
  modified_base 76: mod_base = OTHER; note = 2'-O-methyl ribonucleotide
  modified_base 77: mod_base = OTHER; note = 2'-O-methyl ribonucleotide
  modified_base 78: mod_base = OTHER; note = 2'-O-methyl ribonucleotide
  modified_base 79: mod_base = OTHER; note = 2'-O-methyl ribonucleotide
  modified_base 80: mod_base = OTHER; note = 2'-O-methyl ribonucleotide
  modified_base 82: mod_base = OTHER; note = 2'-O-methyl ribonucleotide
  modified_base 83: mod_base = OTHER; note = 2'-O-methyl ribonucleotide
  modified_base 84: mod_base = OTHER; note = 2'-O-methyl ribonucleotide
  modified_base 85: mod_base = OTHER; note = 2'-O-methyl ribonucleotide
  modified_base 86: mod_base = OTHER; note = 2'-O-methyl ribonucleotide
  modified_base 87: mod_base = OTHER; note = 2'-O-methyl ribonucleotide
  modified_base 89: mod_base = OTHER; note = 2'-O-methyl ribonucleotide
  modified_base 91: mod_base = OTHER; note = 2'-O-methyl ribonucleotide
  modified_base 92: mod_base = OTHER; note = 2'-O-methyl ribonucleotide
  modified_base 93: mod_base = OTHER; note = 2'-O-methyl ribonucleotide
  modified_base 94: mod_base = OTHER; note = 2'-O-methyl ribonucleotide
  modified_base 95: mod_base = OTHER; note = 2'-O-methyl ribonucleotide
  modified_base 96: mod_base = OTHER; note = 2'-O-methyl ribonucleotide
  modified_base 97: mod_base = OTHER; note = 2'-O-methyl ribonucleotide
  modified_base 98: mod_base = OTHER; note = 2'-O-methyl ribonucleotide
  modified_base 99: mod_base = OTHER; note = 2'-O-methyl ribonucleotide
  modified_base 100: mod_base = OTHER; note = 2'-O-methyl ribonucleotide
  modified_base 101: mod_base = OTHER; note = uniform ribonucleotides (A, C, G, inosine or U), deoxynucleotides (A, G, C, inosine or T), ribonebularine, 2'-O-methylnebularine or deoxynebularine
  modified_base 102: mod_base = OTHER; note = uniform ribonucleotides (A, C, G, inosine or U), deoxynucleotides (A, G, C, inosine or T), ribonebularine, 2'-O-methylnebularine or deoxynebularine
  modified_base 103: mod_base = OTHER; note = uniform ribonucleotides (A, C, G, inosine or U), deoxynucleotides (A, G, C, inosine or T), ribonebularine, 2'-O-methylnebularine or deoxynebularine
  modified_base 1..4: mod_base = OTHER; note = phosphorothioate linkage
  modified_base 98..100: mod_base = OTHER; note = phosphorothioate linkage
  misc_feature 1..100: note = RNA
  misc_feature 101..103: note = Optionally DNA or RNA

SEQ ID NO: 2981 - DNA, 103 bp, synthetic construct; identical to SEQ ID NO: 1797
  source 1..103: mol_type = other DNA
  modified_base 1: mod_base = OTHER; note = 2'-O-methyl ribonucleotide
  modified_base 2: mod_base = OTHER; note = 2'-O-methyl ribonucleotide
  modified_base 3: mod_base = OTHER; note = 2'-O-methyl ribonucleotide
  modified_base 21: mod_base = OTHER; note = 2'-O-methyl ribonucleotide
  modified_base 28: mod_base = OTHER; note = 2'-O-methyl ribonucleotide
  modified_base 29: mod_base = OTHER; note = 2'-O-methyl ribonucleotide
  modified_base 30: mod_base = OTHER; note = 2'-O-methyl ribonucleotide
  modified_base 31: mod_base = OTHER; note = 2'-O-methyl ribonucleotide
  modified_base 32: mod_base = OTHER; note = 2'-O-methyl ribonucleotide
  modified_base 34: mod_base = OTHER; note = 2'-O-methyl ribonucleotide
  modified_base 35: mod_base = OTHER; note = 2'-O-methyl ribonucleotide
  modified_base 36: mod_base = OTHER; note = 2'-O-methyl ribonucleotide
  modified_base 37: mod_base = OTHER; note = 2'-O-methyl ribonucleotide
  modified_base 38: mod_base = OTHER; note = 2'-O-methyl ribonucleotide
  modified_base 39: mod_base = OTHER; note = 2'-O-methyl ribonucleotide
  modified_base 40: mod_base = OTHER; note = 2'-O-methyl ribonucleotide
  modified_base 41: mod_base = OTHER; note = 2'-O-methyl ribonucleotide
  modified_base 42: mod_base = OTHER; note = 2'-O-methyl ribonucleotide
  modified_base 46: mod_base = OTHER; note = 2'-O-methyl ribonucleotide
  modified_base 48: mod_base = OTHER; note = 2'-O-methyl ribonucleotide
  modified_base 50: mod_base = OTHER; note = 2'-O-methyl ribonucleotide
  modified_base 52: mod_base = OTHER; note = 2'-O-methyl ribonucleotide
  modified_base 53: mod_base = OTHER; note = 2'-O-methyl ribonucleotide
  modified_base 54: mod_base = OTHER; note = 2'-O-methyl ribonucleotide
  modified_base 57: mod_base = OTHER; note = 2'-O-methyl ribonucleotide
  modified_base 61: mod_base = OTHER; note = 2'-O-methyl ribonucleotide
  modified_base 66: mod_base = OTHER; note = 2'-O-methyl ribonucleotide
  modified_base 67: mod_base = OTHER; note = 2'-O-methyl ribonucleotide
  modified_base 70: mod_base = OTHER; note = 2'-O-methyl ribonucleotide
  modified_base 71: mod_base = OTHER; note = 2'-O-methyl ribonucleotide
  modified_base 72: mod_base = OTHER; note = 2'-O-methyl ribonucleotide
  modified_base 73: mod_base = OTHER; note = 2'-O-methyl ribonucleotide
  modified_base 74: mod_base = OTHER; note = 2'-O-methyl ribonucleotide
  modified_base 75: mod_base = OTHER; note = 2'-O-methyl ribonucleotide
  modified_base 76: mod_base = OTHER; note = 2'-O-methyl ribonucleotide
  modified_base 77: mod_base = OTHER; note = 2'-O-methyl ribonucleotide
  modified_base 78: mod_base = OTHER; note = 2'-O-methyl ribonucleotide
  modified_base 79: mod_base = OTHER; note = 2'-O-methyl ribonucleotide
  modified_base 80: mod_base = OTHER; note = 2'-O-methyl ribonucleotide
  modified_base 82: mod_base = OTHER; note = 2'-O-methyl ribonucleotide
  modified_base 83: mod_base = OTHER; note = 2'-O-methyl ribonucleotide
  modified_base 84: mod_base = OTHER; note = 2'-O-methyl ribonucleotide
  modified_base 85: mod_base = OTHER; note = 2'-O-methyl ribonucleotide
  modified_base 86: mod_base = OTHER; note = 2'-O-methyl ribonucleotide
  modified_base 87: mod_base = OTHER; note = 2'-O-methyl ribonucleotide
  modified_base 89: mod_base = OTHER; note = 2'-O-methyl ribonucleotide
  modified_base 92: mod_base = OTHER; note = 2'-O-methyl ribonucleotide
  modified_base 93: mod_base = OTHER; note = 2'-O-methyl ribonucleotide
  modified_base 94: mod_base = OTHER; note = 2'-O-methyl ribonucleotide
  modified_base 95: mod_base = OTHER; note = 2'-O-methyl ribonucleotide
  modified_base 96: mod_base = OTHER; note = 2'-O-methyl ribonucleotide
  modified_base 97: mod_base = OTHER; note = 2'-O-methyl ribonucleotide
  modified_base 98: mod_base = OTHER; note = 2'-O-methyl ribonucleotide
  modified_base 99: mod_base = OTHER; note = 2'-O-methyl ribonucleotide
  modified_base 100: mod_base = OTHER; note = 2'-O-methyl ribonucleotide
  modified_base 101: mod_base = OTHER; note = uniform ribonucleotides (A, C, G, inosine or U), deoxynucleotides (A, G, C, inosine or T), ribonebularine, 2'-O-methylnebularine or deoxynebularine
  modified_base 102: mod_base = OTHER; note = uniform ribonucleotides (A, C, G, inosine or U), deoxynucleotides (A, G, C, inosine or T), ribonebularine, 2'-O-methylnebularine or deoxynebularine
  modified_base 103: mod_base = OTHER; note = uniform ribonucleotides (A, C, G, inosine or U), deoxynucleotides (A, G, C, inosine or T), ribonebularine, 2'-O-methylnebularine or deoxynebularine
  modified_base 1..4: mod_base = OTHER; note = phosphorothioate linkage
  modified_base 98..100: mod_base = OTHER; note = phosphorothioate linkage
  misc_feature 1..100: note = RNA
  misc_feature 101..103: note = Optionally DNA or RNA

SEQ ID NO: 2982 - DNA, 103 bp, synthetic construct; identical to SEQ ID NO: 1797
  source 1..103: mol_type = other DNA
  modified_base 1: mod_base = OTHER; note = 2'-O-methyl ribonucleotide
  modified_base 2: mod_base = OTHER; note = 2'-O-methyl ribonucleotide
  modified_base 3: mod_base = OTHER; note = 2'-O-methyl ribonucleotide
  modified_base 21: mod_base = OTHER; note = 2'-O-methyl ribonucleotide
  modified_base 28: mod_base = OTHER; note = 2'-O-methyl ribonucleotide
  modified_base 29: mod_base = OTHER; note = 2'-O-methyl ribonucleotide
  modified_base 30: mod_base = OTHER; note = 2'-O-methyl ribonucleotide
  modified_base 31: mod_base = OTHER; note = 2'-O-methyl ribonucleotide
  modified_base 32: mod_base = OTHER; note = 2'-O-methyl ribonucleotide
  modified_base 34: mod_base = OTHER; note = 2'-O-methyl ribonucleotide
  modified_base 35: mod_base = OTHER; note = 2'-O-methyl ribonucleotide
  modified_base 36: mod_base = OTHER; note = 2'-O-methyl ribonucleotide
  modified_base 37: mod_base = OTHER; note = 2'-O-methyl ribonucleotide
  modified_base 38: mod_base = OTHER; note = 2'-O-methyl ribonucleotide
  modified_base 39: mod_base = OTHER; note = 2'-O-methyl ribonucleotide
  modified_base 40: mod_base = OTHER; note = 2'-O-methyl ribonucleotide
  modified_base 41: mod_base = OTHER; note = 2'-O-methyl ribonucleotide
  modified_base 42: mod_base = OTHER; note = 2'-O-methyl ribonucleotide
  modified_base 46: mod_base = OTHER; note = 2'-O-methyl ribonucleotide
  modified_base 48: mod_base = OTHER; note = 2'-O-methyl ribonucleotide
  modified_base 50: mod_base = OTHER; note = 2'-O-methyl ribonucleotide
  modified_base 52: mod_base = OTHER; note = 2'-O-methyl ribonucleotide
  modified_base 53: mod_base = OTHER; note = 2'-O-methyl ribonucleotide
  modified_base 54: mod_base = OTHER; note = 2'-O-methyl ribonucleotide
  modified_base 57: mod_base = OTHER; note = 2'-O-methyl ribonucleotide
  modified_base 61: mod_base = OTHER; note = 2'-O-methyl ribonucleotide
  modified_base 66: mod_base = OTHER; note = 2'-O-methyl ribonucleotide
  modified_base 67: mod_base = OTHER; note = 2'-O-methyl ribonucleotide
  modified_base 70: mod_base = OTHER; note = 2'-O-methyl ribonucleotide
  modified_base 71: mod_base = OTHER; note = 2'-O-methyl ribonucleotide
  modified_base 72: mod_base = OTHER; note = 2'-O-methyl ribonucleotide
  modified_base 73: mod_base = OTHER; note = 2'-O-methyl ribonucleotide
  modified_base 74: mod_base = OTHER; note = 2'-O-methyl ribonucleotide
  modified_base 75: mod_base = OTHER; note = 2'-O-methyl ribonucleotide
  modified_base 76: mod_base = OTHER; note = 2'-O-methyl ribonucleotide
  modified_base 77: mod_base = OTHER; note = 2'-O-methyl ribonucleotide
  modified_base 78: mod_base = OTHER; note = 2'-O-methyl ribonucleotide
  modified_base 79: mod_base = OTHER; note = 2'-O-methyl ribonucleotide
  modified_base 80: mod_base = OTHER; note = 2'-O-methyl ribonucleotide
  modified_base 82: mod_base = OTHER; note = 2'-O-methyl ribonucleotide
  modified_base 83: mod_base = OTHER; note = 2'-O-methyl ribonucleotide
  modified_base 84: mod_base = OTHER; note = 2'-O-methyl ribonucleotide
  modified_base 85: mod_base = OTHER; note = 2'-O-methyl ribonucleotide
  modified_base 86: mod_base = OTHER; note = 2'-O-methyl ribonucleotide
  modified_base 87: mod_base = OTHER; note = 2'-O-methyl ribonucleotide
  modified_base 89: mod_base = OTHER; note = 2'-O-methyl ribonucleotide
  modified_base 91: mod_base = OTHER; note = 2'-O-methyl ribonucleotide
  modified_base 92: mod_base = OTHER; note = 2'-O-methyl ribonucleotide
  modified_base 93: mod_base = OTHER; note = 2'-O-methyl ribonucleotide
  modified_base 94: mod_base = OTHER; note = 2'-O-methyl ribonucleotide
  modified_base 95: mod_base = OTHER; note = 2'-O-methyl ribonucleotide
  modified_base 96: mod_base = OTHER; note = 2'-O-methyl ribonucleotide
  modified_base 97: mod_base = OTHER; note = 2'-O-methyl ribonucleotide
  modified_base 98: mod_base = OTHER; note = 2'-O-methyl ribonucleotide
  modified_base 99: mod_base = OTHER; note = 2'-O-methyl ribonucleotide
  modified_base 100: mod_base = OTHER; note = 2'-O-methyl ribonucleotide
  modified_base 101: mod_base = OTHER; note = uniform ribonucleotides (A, C, G, inosine or U), deoxynucleotides (A, G, C, inosine or T), ribonebularine, 2'-O-methylnebularine or deoxynebularine
  modified_base 102: mod_base = OTHER; note = uniform ribonucleotides (A, C, G, inosine or U), deoxynucleotides (A, G, C, inosine or T), ribonebularine, 2'-O-methylnebularine or deoxynebularine
  modified_base 103: mod_base = OTHER; note = uniform ribonucleotides (A, C, G, inosine or U), deoxynucleotides (A, G, C, inosine or T), ribonebularine, 2'-O-methylnebularine or deoxynebularine
  modified_base 1..4: mod_base = OTHER; note = phosphorothioate linkage
  modified_base 98..100: mod_base = OTHER; note = phosphorothioate linkage
  misc_feature 1..100: note = RNA
  misc_feature 101..103: note = Optionally DNA or RNA

SEQ ID NO: 2983 - DNA, 103 bp, synthetic construct; identical to SEQ ID NO: 1797
  source 1..103: mol_type = other DNA
  modified_base 1: mod_base = OTHER; note = 2'-O-methyl ribonucleotide
  modified_base 2: mod_base = OTHER; note = 2'-O-methyl ribonucleotide
  modified_base 3: mod_base = OTHER; note = 2'-O-methyl ribonucleotide
  modified_base 21: mod_base = OTHER; note = 2'-O-methyl ribonucleotide
  modified_base 28: mod_base = OTHER; note = 2'-O-methyl ribonucleotide
  modified_base 29: mod_base = OTHER; note = 2'-O-methyl ribonucleotide
  modified_base 30: mod_base = OTHER; note = 2'-O-methyl ribonucleotide
  modified_base 31: mod_base = OTHER; note = 2'-O-methyl ribonucleotide
  modified_base 32: mod_base = OTHER; note = 2'-O-methyl ribonucleotide
  modified_base 34: mod_base = OTHER; note = 2'-O-methyl ribonucleotide
  modified_base 35: mod_base = OTHER; note = 2'-O-methyl ribonucleotide
  modified_base 36: mod_base = OTHER; note = 2'-O-methyl ribonucleotide
  modified_base 37: mod_base = OTHER; note = 2'-O-methyl ribonucleotide
  modified_base 38: mod_base = OTHER; note = 2'-O-methyl ribonucleotide
  modified_base 39: mod_base = OTHER; note = 2'-O-methyl ribonucleotide
  modified_base 40: mod_base = OTHER; note = 2'-O-methyl ribonucleotide
  modified_base 41: mod_base = OTHER; note = 2'-O-methyl ribonucleotide
  modified_base 42: mod_base = OTHER; note = 2'-O-methyl ribonucleotide
  modified_base 46: mod_base = OTHER; note = 2'-O-methyl ribonucleotide
  modified_base 48: mod_base = OTHER; note = 2'-O-methyl ribonucleotide
  modified_base 50: mod_base = OTHER; note = 2'-O-methyl ribonucleotide
  modified_base 52: mod_base = OTHER; note = 2'-O-methyl ribonucleotide
  modified_base 53: mod_base = OTHER; note = 2'-O-methyl ribonucleotide
  modified_base 54: mod_base = OTHER; note = 2'-O-methyl ribonucleotide
  modified_base 55: mod_base = OTHER; note = 2'-O-methyl ribonucleotide
  modified_base 56: mod_base = OTHER; note = 2'-O-methyl ribonucleotide
  modified_base 57: mod_base = OTHER; note = 2'-O-methyl ribonucleotide
  modified_base 60: mod_base = OTHER; note = 2'-O-methyl ribonucleotide
  modified_base 61: mod_base = OTHER; note = 2'-O-methyl ribonucleotide
  modified_base 66: mod_base = OTHER; note = 2'-O-methyl ribonucleotide
  modified_base 67: mod_base = OTHER; note = 2'-O-methyl ribonucleotide
  modified_base 70: mod_base = OTHER; note = 2'-O-methyl ribonucleotide
  modified_base 71: mod_base = OTHER; note = 2'-O-methyl ribonucleotide
  modified_base 72: mod_base = OTHER; note = 2'-O-methyl ribonucleotide
  modified_base 74: mod_base = OTHER; note = 2'-O-methyl ribonucleotide
  modified_base 75: mod_base = OTHER; note = 2'-O-methyl ribonucleotide
  modified_base 76: mod_base = OTHER; note = 2'-O-methyl ribonucleotide
  modified_base 77: mod_base = OTHER; note = 2'-O-methyl ribonucleotide
  modified_base 78: mod_base = OTHER; note = 2'-O-methyl ribonucleotide
  modified_base 79: mod_base = OTHER; note = 2'-O-methyl ribonucleotide
  modified_base 80: mod_base = OTHER; note = 2'-O-methyl ribonucleotide
  modified_base 82: mod_base = OTHER; note = 2'-O-methyl ribonucleotide
  modified_base 83: mod_base = OTHER; note = 2'-O-methyl ribonucleotide
  modified_base 84: mod_base = OTHER; note = 2'-O-methyl ribonucleotide
  modified_base 85: mod_base = OTHER; note = 2'-O-methyl ribonucleotide
  modified_base 86: mod_base = OTHER; note = 2'-O-methyl ribonucleotide
  modified_base 87: mod_base = OTHER; note = 2'-O-methyl ribonucleotide
  modified_base 89: mod_base = OTHER; note = 2'-O-methyl ribonucleotide
  modified_base 92: mod_base = OTHER; note = 2'-O-methyl ribonucleotide
  modified_base 93: mod_base = OTHER; note = 2'-O-methyl ribonucleotide
  modified_base 94: mod_base = OTHER; note = 2'-O-methyl ribonucleotide
  modified_base 95: mod_base = OTHER; note = 2'-O-methyl ribonucleotide
  modified_base 96: mod_base = OTHER; note = 2'-O-methyl ribonucleotide
  modified_base 97: mod_base = OTHER; note = 2'-O-methyl ribonucleotide
  modified_base 98: mod_base = OTHER; note = 2'-O-methyl ribonucleotide
  modified_base 99: mod_base = OTHER; note = 2'-O-methyl ribonucleotide
  modified_base 100: mod_base = OTHER; note = 2'-O-methyl ribonucleotide
  modified_base 101: mod_base = OTHER; note = uniform ribonucleotides (A, C, G, inosine or U), deoxynucleotides (A, G, C, inosine or T), ribonebularine, 2'-O-methylnebularine or deoxynebularine
  modified_base 102: mod_base = OTHER; note = uniform ribonucleotides (A, C, G, inosine or U), deoxynucleotides (A, G, C, inosine or T), ribonebularine, 2'-O-methylnebularine or deoxynebularine
  modified_base 103: mod_base = OTHER; note = uniform ribonucleotides (A, C, G, inosine or U), deoxynucleotides (A, G, C, inosine or T), ribonebularine, 2'-O-methylnebularine or deoxynebularine
  modified_base 1..4: mod_base = OTHER; note = phosphorothioate linkage
  modified_base 98..100: mod_base = OTHER; note = phosphorothioate linkage
  misc_feature 1..100: note = RNA
  misc_feature 101..103: note = Optionally DNA or RNA

SEQ ID NO: 2984 - DNA, 103 bp, synthetic construct; identical to SEQ ID NO: 1795
  source 1..103: mol_type = other DNA
  modified_base 1: mod_base = OTHER; note = 2'-O-methyl ribonucleotide
  modified_base 2: mod_base = OTHER; note = 2'-O-methyl ribonucleotide
  modified_base 3: mod_base = OTHER; note = 2'-O-methyl ribonucleotide
  modified_base 21: mod_base = OTHER; note = 2'-O-methyl ribonucleotide
  modified_base 28: mod_base = OTHER; note = 2'-O-methyl ribonucleotide
  modified_base 29: mod_base = OTHER; note = 2'-O-methyl ribonucleotide
  modified_base 30: mod_base = OTHER; note = 2'-O-methyl ribonucleotide
  modified_base 31: mod_base = OTHER; note = 2'-O-methyl ribonucleotide
  modified_base 32: mod_base = OTHER; note = 2'-O-methyl ribonucleotide
  modified_base 33: mod_base = OTHER; note = 2'-O-methyl ribonucleotide
  modified_base 34: mod_base = OTHER; note = 2'-O-methyl ribonucleotide
  modified_base 35: mod_base = OTHER; note = 2'-O-methyl ribonucleotide
  modified_base 36: mod_base = OTHER; note = 2'-O-methyl ribonucleotide
  modified_base 37: mod_base = OTHER; note = 2'-O-methyl ribonucleotide
  modified_base 38: mod_base = OTHER; note = 2'-O-methyl ribonucleotide
  modified_base 39: mod_base = OTHER; note = 2'-O-methyl ribonucleotide
  modified_base 40: mod_base = OTHER; note = 2'-O-methyl ribonucleotide
  modified_base 41: mod_base = OTHER; note = 2'-O-methyl ribonucleotide
  modified_base 42: mod_base = OTHER; note = 2'-O-methyl ribonucleotide
  modified_base 46: mod_base = OTHER; note = 2'-O-methyl ribonucleotide
  modified_base 48: mod_base = OTHER; note = 2'-O-methyl ribonucleotide
  modified_base 50: mod_base = OTHER; note = 2'-O-methyl ribonucleotide
  modified_base 52: mod_base = OTHER; note = 2'-O-methyl ribonucleotide
  modified_base 53: mod_base = OTHER; note = 2'-O-methyl ribonucleotide
  modified_base 54: mod_base = OTHER; note = 2'-O-methyl ribonucleotide
  modified_base 55: mod_base = OTHER; note = 2'-O-methyl ribonucleotide
  modified_base 56: mod_base = OTHER; note = 2'-O-methyl ribonucleotide
  modified_base 57: mod_base = OTHER; note = 2'-O-methyl ribonucleotide
  modified_base 60: mod_base = OTHER; note = 2'-O-methyl ribonucleotide
  modified_base 61: mod_base = OTHER; note = 2'-O-methyl ribonucleotide
  modified_base 66: mod_base = OTHER; note = 2'-O-methyl ribonucleotide
  modified_base 67: mod_base = OTHER; note = 2'-O-methyl ribonucleotide
  modified_base 70: mod_base = OTHER; note = 2'-O-methyl ribonucleotide
  modified_base 71: mod_base = OTHER; note = 2'-O-methyl ribonucleotide
  modified_base 72: mod_base = OTHER; note = 2'-O-methyl ribonucleotide
  modified_base 73: mod_base = OTHER; note = 2'-O-methyl ribonucleotide
  modified_base 74: mod_base = OTHER; note = 2'-O-methyl ribonucleotide
  modified_base 75: mod_base = OTHER; note = 2'-O-methyl ribonucleotide
  modified_base 76: mod_base = OTHER; note = 2'-O-methyl ribonucleotide
  modified_base 77: mod_base = OTHER; note = 2'-O-methyl ribonucleotide
  modified_base 78: mod_base = OTHER; note = 2'-O-methyl ribonucleotide
  modified_base 79: mod_base = OTHER; note = 2'-O-methyl ribonucleotide
  modified_base 80: mod_base = OTHER; note = 2'-O-methyl ribonucleotide
  modified_base 81: mod_base = OTHER; note = 2'-O-methyl ribonucleotide
  modified_base 83: mod_base = OTHER; note = 2'-O-methyl ribonucleotide
  modified_base 84: mod_base = OTHER; note = 2'-O-methyl ribonucleotide
  modified_base 85: mod_base = OTHER; note = 2'-O-methyl ribonucleotide
  modified_base 86: mod_base = OTHER; note = 2'-O-methyl ribonucleotide
  modified_base 87: mod_base = OTHER; note = 2'-O-methyl ribonucleotide
  modified_base 88: mod_base = OTHER; note = 2'-O-methyl ribonucleotide
  modified_base 89: mod_base = OTHER; note = 2'-O-methyl ribonucleotide
  modified_base 90: mod_base = OTHER; note = 2'-O-methyl ribonucleotide
  modified_base 91: mod_base = OTHER; note = 2'-O-methyl ribonucleotide
  modified_base 92: mod_base = OTHER; note = 2'-O-methyl ribonucleotide
  modified_base 93: mod_base = OTHER; note = 2'-O-methyl ribonucleotide
  modified_base 94: mod_base = OTHER; note = 2'-O-methyl ribonucleotide
  modified_base 95: mod_base = OTHER; note = 2'-O-methyl ribonucleotide
  modified_base 96: mod_base = OTHER; note = 2'-O-methyl ribonucleotide
  modified_base 97: mod_base = OTHER; note = 2'-O-methyl ribonucleotide
  modified_base 98: mod_base = OTHER; note = 2'-O-methyl ribonucleotide
  modified_base 99: mod_base = OTHER; note = 2'-O-methyl ribonucleotide
  modified_base 100: mod_base = OTHER; note = 2'-O-methyl ribonucleotide
  modified_base 101: mod_base = OTHER; note = uniform ribonucleotides (A, C, G, inosine or U), deoxynucleotides (A, G, C, inosine or T), ribonebularine, 2'-O-methylnebularine or deoxynebularine
  modified_base 102: mod_base = OTHER; note = uniform ribonucleotides (A, C, G, inosine or U), deoxynucleotides (A, G, C, inosine or T), ribonebularine, 2'-O-methylnebularine or deoxynebularine
  modified_base 103: mod_base = OTHER; note = uniform ribonucleotides (A, C, G, inosine or U), deoxynucleotides (A, G, C, inosine or T), ribonebularine, 2'-O-methylnebularine or deoxynebularine
  modified_base 1..4: mod_base = OTHER; note = phosphorothioate linkage
  modified_base 98..100: mod_base = OTHER; note = phosphorothioate linkage
  misc_feature 1..100: note = RNA
  misc_feature 101..103: note = Optionally DNA or RNA

SEQ ID NO: 2985 - DNA, 103 bp, synthetic construct; identical to SEQ ID NO: 1795
  source 1..103: mol_type = other DNA
  modified_base 1: mod_base = OTHER; note = 2'-O-methyl ribonucleotide
  modified_base 2: mod_base = OTHER; note = 2'-O-methyl ribonucleotide
  modified_base 3: mod_base = OTHER; note = 2'-O-methyl ribonucleotide
  modified_base 21: mod_base = OTHER; note = 2'-O-methyl ribonucleotide
  modified_base 28: mod_base = OTHER; note = 2'-O-methyl ribonucleotide
  modified_base 29: mod_base = OTHER; note = 2'-O-methyl ribonucleotide
  modified_base 30: mod_base = OTHER; note = 2'-O-methyl ribonucleotide
  modified_base 31: mod_base = OTHER; note = 2'-O-methyl ribonucleotide
  modified_base 32: mod_base = OTHER; note = 2'-O-methyl ribonucleotide
  modified_base 34: mod_base = OTHER; note = 2'-O-methyl ribonucleotide
  modified_base 35: mod_base = OTHER; note = 2'-O-methyl ribonucleotide
  modified_base 36: mod_base = OTHER; note = 2'-O-methyl ribonucleotide
  modified_base 37: mod_base = OTHER; note = 2'-O-methyl ribonucleotide
  modified_base 38: mod_base = OTHER; note = 2'-O-methyl ribonucleotide
  modified_base 39: mod_base = OTHER; note = 2'-O-methyl ribonucleotide
  modified_base 40: mod_base = OTHER; note = 2'-O-methyl ribonucleotide
  modified_base 41: mod_base = OTHER; note = 2'-O-methyl ribonucleotide
  modified_base 42: mod_base = OTHER; note = 2'-O-methyl ribonucleotide
  modified_base 46: mod_base = OTHER; note = 2'-O-methyl ribonucleotide
  modified_base 48: mod_base = OTHER; note = 2'-O-methyl ribonucleotide
  modified_base 50: mod_base = OTHER; note = 2'-O-methyl ribonucleotide
  modified_base 52: mod_base = OTHER; note = 2'-O-methyl ribonucleotide
  modified_base 53: mod_base = OTHER; note = 2'-O-methyl ribonucleotide
  modified_base 54: mod_base = OTHER; note = 2'-O-methyl ribonucleotide
  modified_base 55: mod_base = OTHER; note = 2'-O-methyl ribonucleotide
  modified_base 56: mod_base = OTHER; note = 2'-O-methyl ribonucleotide
  modified_base 57: mod_base = OTHER; note = 2'-O-methyl ribonucleotide
  modified_base 60: mod_base = OTHER; note = 2'-O-methyl ribonucleotide
  modified_base 61: mod_base = OTHER; note = 2'-O-methyl ribonucleotide
  modified_base 66: mod_base = OTHER; note = 2'-O-methyl ribonucleotide
  modified_base 67: mod_base = OTHER; note = 2'-O-methyl ribonucleotide
  modified_base 70: mod_base = OTHER; note = 2'-O-methyl ribonucleotide
  modified_base 71: mod_base = OTHER; note = 2'-O-methyl ribonucleotide
  modified_base 72: mod_base = OTHER; note = 2'-O-methyl ribonucleotide
  modified_base 74: mod_base = OTHER; note = 2'-O-methyl ribonucleotide
  modified_base 75: mod_base = OTHER; note = 2'-O-methyl ribonucleotide
  modified_base 76: mod_base = OTHER; note = 2'-O-methyl ribonucleotide
  modified_base 77: mod_base = OTHER; note = 2'-O-methyl ribonucleotide
  modified_base 78: mod_base = OTHER; note = 2'-O-methyl ribonucleotide
  modified_base 79: mod_base = OTHER; note = 2'-O-methyl ribonucleotide
  modified_base 80: mod_base = OTHER; note = 2'-O-methyl ribonucleotide
  modified_base 81: mod_base = OTHER; note = 2'-O-methyl ribonucleotide
  modified_base 83: mod_base = OTHER; note = 2'-O-methyl ribonucleotide
  modified_base 84: mod_base = OTHER; note = 2'-O-methyl ribonucleotide
  modified_base 85: mod_base = OTHER; note = 2'-O-methyl ribonucleotide
  modified_base 86: mod_base = OTHER; note = 2'-O-methyl ribonucleotide
  modified_base 87: mod_base = OTHER; note = 2'-O-methyl ribonucleotide
  modified_base 88: mod_base = OTHER; note = 2'-O-methyl ribonucleotide
  modified_base 89: mod_base = OTHER; note = 2'-O-methyl ribonucleotide
  modified_base 90: mod_base = OTHER; note = 2'-O-methyl ribonucleotide
  modified_base 91: mod_base = OTHER; note = 2'-O-methyl ribonucleotide
  modified_base 92: mod_base = OTHER; note = 2'-O-methyl ribonucleotide
  modified_base 93: mod_base = OTHER; note = 2'-O-methyl ribonucleotide
  modified_base 94: mod_base = OTHER; note = 2'-O-methyl ribonucleotide
  modified_base 95: mod_base = OTHER; note = 2'-O-methyl ribonucleotide
  modified_base 96: mod_base = OTHER; note = 2'-O-methyl ribonucleotide
  modified_base 97: mod_base = OTHER; note = 2'-O-methyl ribonucleotide
  modified_base 98: mod_base = OTHER; note = 2'-O-methyl ribonucleotide
  modified_base 99: mod_base = OTHER; note = 2'-O-methyl ribonucleotide
  modified_base 100: mod_base = OTHER; note = 2'-O-methyl ribonucleotide
  modified_base 101: mod_base = OTHER; note = uniform ribonucleotides (A, C, G, inosine or U), deoxynucleotides (A, G, C, inosine or T), ribonebularine, 2'-O-methylnebularine or deoxynebularine
  modified_base 102: mod_base = OTHER; note = uniform ribonucleotides (A, C, G, inosine or U), deoxynucleotides (A, G, C, inosine or T), ribonebularine, 2'-O-methylnebularine or deoxynebularine
  modified_base 103: mod_base = OTHER; note = uniform ribonucleotides (A, C, G, inosine or U), deoxynucleotides (A, G, C, inosine or T), ribonebularine, 2'-O-methylnebularine or deoxynebularine
  modified_base 1..4: mod_base = OTHER; note = phosphorothioate linkage
  modified_base 98..100: mod_base = OTHER; note = phosphorothioate linkage
  misc_feature 1..100: note = RNA
  misc_feature 101..103: note = Optionally DNA or RNA

SEQ ID NO: 2986 - DNA, 103 bp, synthetic construct; identical to SEQ ID NO: 1796
  source 1..103: mol_type = other DNA
  modified_base 1: mod_base = OTHER; note = 2'-O-methyl ribonucleotide
  modified_base 2: mod_base = OTHER; note = 2'-O-methyl ribonucleotide
  modified_base 3: mod_base = OTHER; note = 2'-O-methyl ribonucleotide
  modified_base 21: mod_base = OTHER; note = 2'-O-methyl ribonucleotide
  modified_base 28: mod_base = OTHER; note = 2'-O-methyl ribonucleotide
  modified_base 29: mod_base = OTHER; note = 2'-O-methyl ribonucleotide
  modified_base 30: mod_base = OTHER; note = 2'-O-methyl ribonucleotide
  modified_base 31: mod_base = OTHER; note = 2'-O-methyl ribonucleotide
  modified_base 32: mod_base = OTHER; note = 2'-O-methyl ribonucleotide
  modified_base 33: mod_base = OTHER; note = 2'-O-methyl ribonucleotide
  modified_base 34: mod_base = OTHER; note = 2'-O-methyl ribonucleotide
  modified_base 35: mod_base = OTHER; note = 2'-O-methyl ribonucleotide
  modified_base 36: mod_base = OTHER; note = 2'-O-methyl ribonucleotide
  modified_base 37: mod_base = OTHER; note = 2'-O-methyl ribonucleotide
  modified_base 38: mod_base = OTHER; note = 2'-O-methyl ribonucleotide
  modified_base 39: mod_base = OTHER; note = 2'-O-methyl ribonucleotide
  modified_base 40: mod_base = OTHER; note = 2'-O-methyl ribonucleotide
  modified_base 41: mod_base = OTHER; note = 2'-O-methyl ribonucleotide
  modified_base 42: mod_base = OTHER; note = 2'-O-methyl ribonucleotide
  modified_base 46: mod_base = OTHER; note = 2'-O-methyl ribonucleotide
  modified_base 48: mod_base = OTHER; note = 2'-O-methyl ribonucleotide
  modified_base 50: mod_base = OTHER; note = 2'-O-methyl ribonucleotide
  modified_base 52: mod_base = OTHER; note = 2'-O-methyl ribonucleotide
  modified_base 53: mod_base = OTHER; note = 2'-O-methyl ribonucleotide
  modified_base 54: mod_base = OTHER; note = 2'-O-methyl ribonucleotide
  modified_base 55: mod_base = OTHER; note = 2'-O-methyl ribonucleotide
  modified_base 56: mod_base = OTHER; note = 2'-O-methyl ribonucleotide
  modified_base 57: mod_base = OTHER; note = 2'-O-methyl ribonucleotide
  modified_base 60: mod_base = OTHER; note = 2'-O-methyl ribonucleotide
  modified_base 61: mod_base = OTHER; note = 2'-O-methyl ribonucleotide
  modified_base 66: mod_base = OTHER; note = 2'-O-methyl ribonucleotide
  modified_base 67: mod_base = OTHER; note = 2'-O-methyl ribonucleotide
  modified_base 70: mod_base = OTHER; note = 2'-O-methyl ribonucleotide
  modified_base 71: mod_base = OTHER; note = 2'-O-methyl ribonucleotide
  modified_base 72: mod_base = OTHER; note = 2'-O-methyl ribonucleotide
  modified_base 73: mod_base = OTHER; note = 2'-O-methyl ribonucleotide
  modified_base 74: mod_base = OTHER; note = 2'-O-methyl ribonucleotide
  modified_base 75: mod_base = OTHER; note = 2'-O-methyl ribonucleotide
  modified_base 76: mod_base = OTHER; note = 2'-O-methyl ribonucleotide
  modified_base 77: mod_base = OTHER; note = 2'-O-methyl ribonucleotide
  modified_base 78: mod_base = OTHER; note = 2'-O-methyl ribonucleotide
  modified_base 79: mod_base = OTHER; note = 2'-O-methyl ribonucleotide
  modified_base 80: mod_base = OTHER; note = 2'-O-methyl ribonucleotide
  modified_base 81: mod_base = OTHER; note = 2'-O-methyl ribonucleotide
  modified_base 83: mod_base = OTHER; note = 2'-O-methyl ribonucleotide
  modified_base 84: mod_base = OTHER; note = 2'-O-methyl ribonucleotide
  modified_base 85: mod_base = OTHER; note = 2'-O-methyl ribonucleotide
  modified_base 86: mod_base = OTHER; note = 2'-O-methyl ribonucleotide
  modified_base 87: mod_base = OTHER; note = 2'-O-methyl ribonucleotide
  modified_base 88: mod_base = OTHER; note = 2'-O-methyl ribonucleotide
  modified_base 89: mod_base = OTHER; note = 2'-O-methyl ribonucleotide
  modified_base 90: mod_base = OTHER; note = 2'-O-methyl ribonucleotide
  modified_base 91: mod_base = OTHER; note = 2'-O-methyl ribonucleotide
  modified_base 92: mod_base = OTHER; note = 2'-O-methyl ribonucleotide
  modified_base 93: mod_base = OTHER; note = 2'-O-methyl ribonucleotide
  modified_base 94: mod_base = OTHER; note = 2'-O-methyl ribonucleotide
  modified_base 95: mod_base = OTHER; note = 2'-O-methyl ribonucleotide
  modified_base 96: mod_base = OTHER; note = 2'-O-methyl ribonucleotide
  modified_base 97: mod_base = OTHER; note = 2'-O-methyl ribonucleotide
  modified_base 98: mod_base = OTHER; note = 2'-O-methyl ribonucleotide
  modified_base 99: mod_base = OTHER; note = 2'-O-methyl ribonucleotide
  modified_base 100: mod_base = OTHER; note = 2'-O-methyl ribonucleotide
  modified_base 101: mod_base = OTHER; note = uniform ribonucleotides (A, C, G, inosine or U), deoxynucleotides (A, G, C, inosine or T), ribonebularine, 2'-O-methylnebularine or deoxynebularine
  modified_base 102: mod_base = OTHER; note = uniform ribonucleotides (A, C, G, inosine or U), deoxynucleotides (A, G, C, inosine or T), ribonebularine, 2'-O-methylnebularine or deoxynebularine
  modified_base 103: mod_base = OTHER; note = uniform ribonucleotides (A, C, G, inosine or U), deoxynucleotides (A, G, C, inosine or T), ribonebularine, 2'-O-methylnebularine or deoxynebularine
  modified_base 1..4: mod_base = OTHER; note = phosphorothioate linkage
  modified_base 98..100: mod_base = OTHER; note = phosphorothioate linkage
  misc_feature 1..100: note = RNA
  misc_feature 101..103: note = Optionally DNA or RNA

SEQ ID NO: 2987 - DNA, 103 bp, synthetic construct; identical to SEQ ID NO: 1796
  source 1..103: mol_type = other DNA
  modified_base 1: mod_base = OTHER; note = 2'-O-methyl ribonucleotide
  modified_base 2: mod_base = OTHER; note = 2'-O-methyl ribonucleotide
  modified_base 3: mod_base = OTHER; note = 2'-O-methyl ribonucleotide
  modified_base 21: mod_base = OTHER; note = 2'-O-methyl ribonucleotide
  modified_base 28: mod_base = OTHER; note = 2'-O-methyl ribonucleotide
  modified_base 29: mod_base = OTHER; note = 2'-O-methyl ribonucleotide
  modified_base 30: mod_base = OTHER; note = 2'-O-methyl ribonucleotide
  modified_base 31: mod_base = OTHER; note = 2'-O-methyl ribonucleotide
  modified_base 32: mod_base = OTHER; note = 2'-O-methyl ribonucleotide
  modified_base 34: mod_base = OTHER; note = 2'-O-methyl ribonucleotide
  modified_base 35: mod_base = OTHER; note = 2'-O-methyl ribonucleotide
  modified_base 36: mod_base = OTHER; note = 2'-O-methyl ribonucleotide
  modified_base 37: mod_base = OTHER; note = 2'-O-methyl ribonucleotide
  modified_base 38: mod_base = OTHER; note = 2'-O-methyl ribonucleotide
  modified_base 39: mod_base = OTHER; note = 2'-O-methyl ribonucleotide
  modified_base 40: mod_base = OTHER; note = 2'-O-methyl ribonucleotide
  modified_base 41: mod_base = OTHER; note = 2'-O-methyl ribonucleotide
  modified_base 42: mod_base = OTHER; note = 2'-O-methyl ribonucleotide
  modified_base 46: mod_base = OTHER; note = 2'-O-methyl ribonucleotide
  modified_base 48: mod_base = OTHER; note = 2'-O-methyl ribonucleotide
  modified_base 50: mod_base = OTHER; note = 2'-O-methyl ribonucleotide
  modified_base 52: mod_base = OTHER; note = 2'-O-methyl ribonucleotide
  modified_base 53: mod_base = OTHER; note = 2'-O-methyl ribonucleotide
  modified_base 54: mod_base = OTHER; note = 2'-O-methyl ribonucleotide
  modified_base 55: mod_base = OTHER; note = 2'-O-methyl ribonucleotide
  modified_base 56: mod_base = OTHER; note = 2'-O-methyl ribonucleotide
  modified_base 57: mod_base = OTHER; note = 2'-O-methyl ribonucleotide
  modified_base 60: mod_base = OTHER; note = 2'-O-methyl ribonucleotide
  modified_base 61: mod_base = OTHER; note = 2'-O-methyl ribonucleotide
  modified_base 66: mod_base = OTHER; note = 2'-O-methyl ribonucleotide
  modified_base 67: mod_base = OTHER; note = 2'-O-methyl ribonucleotide
  modified_base 70: mod_base = OTHER; note = 2'-O-methyl ribonucleotide
  modified_base 71: mod_base = OTHER; note = 2'-O-methyl ribonucleotide
  modified_base 72: mod_base = OTHER; note = 2'-O-methyl ribonucleotide
  modified_base 74: mod_base = OTHER; note = 2'-O-methyl ribonucleotide
  modified_base 75: mod_base = OTHER; note = 2'-O-methyl ribonucleotide
  modified_base 76: mod_base = OTHER; note = 2'-O-methyl ribonucleotide
  modified_base 77: mod_base = OTHER; note = 2'-O-methyl ribonucleotide
  modified_base 78: mod_base = OTHER; note = 2'-O-methyl ribonucleotide
  modified_base 79: mod_base = OTHER; note = 2'-O-methyl ribonucleotide
  modified_base 80: mod_base = OTHER; note = 2'-O-methyl ribonucleotide
  modified_base 81: mod_base = OTHER; note = 2'-O-methyl ribonucleotide
  modified_base 83: mod_base = OTHER; note = 2'-O-methyl ribonucleotide
  modified_base 84: mod_base = OTHER; note = 2'-O-methyl ribonucleotide
  modified_base 85: mod_base = OTHER; note = 2'-O-methyl ribonucleotide
  modified_base 86: mod_base = OTHER; note = 2'-O-methyl ribonucleotide
  modified_base 87: mod_base = OTHER; note = 2'-O-methyl ribonucleotide
  modified_base 88: mod_base = OTHER; note = 2'-O-methyl ribonucleotide
  modified_base 89: mod_base = OTHER; note = 2'-O-methyl ribonucleotide
  modified_base 90: mod_base = OTHER; note = 2'-O-methyl ribonucleotide
  modified_base 91: mod_base = OTHER; note = 2'-O-methyl ribonucleotide
  modified_base 92: mod_base = OTHER; note = 2'-O-methyl ribonucleotide
  modified_base 93: mod_base = OTHER; note = 2'-O-methyl ribonucleotide
  modified_base 94: mod_base = OTHER; note = 2'-O-methyl ribonucleotide
  modified_base 95: mod_base = OTHER; note = 2'-O-methyl ribonucleotide
  modified_base 96: mod_base = OTHER; note = 2'-O-methyl ribonucleotide
  modified_base 97: mod_base = OTHER; note = 2'-O-methyl ribonucleotide
  modified_base 98: mod_base = OTHER; note = 2'-O-methyl ribonucleotide
  modified_base 99: mod_base = OTHER; note = 2'-O-methyl ribonucleotide
  modified_base 100: mod_base = OTHER; note = 2'-O-methyl ribonucleotide
  modified_base 101: mod_base = OTHER; note = uniform ribonucleotides (A, C, G, inosine or U), deoxynucleotides (A, G, C, inosine or T), ribonebularine, 2'-O-methylnebularine or deoxynebularine
  modified_base 102: mod_base = OTHER; note = uniform ribonucleotides (A, C, G, inosine or U), deoxynucleotides (A, G, C, inosine or T), ribonebularine, 2'-O-methylnebularine or deoxynebularine
  modified_base 103: mod_base = OTHER; note = uniform ribonucleotides (A, C, G, inosine or U), deoxynucleotides (A, G, C, inosine or T), ribonebularine, 2'-O-methylnebularine or deoxynebularine
  modified_base 1..4: mod_base = OTHER; note = phosphorothioate linkage
  modified_base 98..100: mod_base = OTHER; note = phosphorothioate linkage
  misc_feature 1..100: note = RNA
  misc_feature 101..103: note = Optionally DNA or RNA

SEQ ID NO: 2988 - DNA, 103 bp, synthetic construct; identical to SEQ ID NO: 1795
  source 1..103: mol_type = other DNA
  modified_base 1: mod_base = OTHER; note = 2'-O-methyl ribonucleotide
  modified_base 2: mod_base = OTHER; note = 2'-O-methyl ribonucleotide
  modified_base 3: mod_base = OTHER; note = 2'-O-methyl ribonucleotide
  modified_base 21: mod_base = OTHER; note = 2'-O-methyl ribonucleotide
  modified_base 28: mod_base = OTHER; note = 2'-O-methyl ribonucleotide
  modified_base 29: mod_base = OTHER; note = 2'-O-methyl ribonucleotide
  modified_base 30: mod_base = OTHER; note = 2'-O-methyl ribonucleotide
  modified_base 31: mod_base = OTHER; note = 2'-O-methyl ribonucleotide
  modified_base 32: mod_base = OTHER; note = 2'-O-methyl ribonucleotide
  modified_base 33: mod_base = OTHER; note = 2'-O-methyl ribonucleotide
  modified_base 34: mod_base = OTHER; note = 2'-O-methyl ribonucleotide
  modified_base 35: mod_base = OTHER; note = 2'-O-methyl ribonucleotide
  modified_base 36: mod_base = OTHER; note = 2'-O-methyl ribonucleotide
  modified_base 37: mod_base = OTHER; note = 2'-O-methyl ribonucleotide
  modified_base 38: mod_base = OTHER; note = 2'-O-methyl ribonucleotide
  modified_base 39: mod_base = OTHER; note = 2'-O-methyl ribonucleotide
  modified_base 40: mod_base = OTHER; note = 2'-O-methyl ribonucleotide
  modified_base 41: mod_base = OTHER; note = 2'-O-methyl ribonucleotide
  modified_base 42: mod_base = OTHER; note = 2'-O-methyl ribonucleotide
  modified_base 46: mod_base = OTHER; note = 2'-O-methyl ribonucleotide
  modified_base 48: mod_base = OTHER; note = 2'-O-methyl ribonucleotide
  modified_base 50: mod_base = OTHER; note = 2'-O-methyl ribonucleotide
  modified_base 52: mod_base = OTHER; note = 2'-O-methyl ribonucleotide
  modified_base 53: mod_base = OTHER; note = 2'-O-methyl ribonucleotide
  modified_base 54: mod_base = OTHER; note = 2'-O-methyl ribonucleotide
  modified_base 55: mod_base = OTHER; note = 2'-O-methyl ribonucleotide
  modified_base 56: mod_base = OTHER; note = 2'-O-methyl ribonucleotide
  modified_base 57: mod_base = OTHER; note = 2'-O-methyl ribonucleotide
  modified_base 60: mod_base = OTHER; note = 2'-O-methyl ribonucleotide
  modified_base 61: mod_base = OTHER; note = 2'-O-methyl ribonucleotide
  modified_base 66: mod_base = OTHER; note = 2'-O-methyl ribonucleotide
  modified_base 67: mod_base = OTHER; note = 2'-O-methyl ribonucleotide
  modified_base 70: mod_base = OTHER; note = 2'-O-methyl ribonucleotide
  modified_base 71: mod_base = OTHER; note = 2'-O-methyl ribonucleotide
  modified_base 72: mod_base = OTHER; note = 2'-O-methyl ribonucleotide
  modified_base 73: mod_base = OTHER; note = 2'-O-methyl ribonucleotide
  modified_base 74: mod_base = OTHER; note = 2'-O-methyl ribonucleotide
  modified_base 75: mod_base = OTHER; note = 2'-O-methyl ribonucleotide
  modified_base 76: mod_base = OTHER; note = 2'-O-methyl ribonucleotide
  modified_base 77: mod_base = OTHER; note = 2'-O-methyl ribonucleotide
  modified_base 78: mod_base = OTHER; note = 2'-O-methyl ribonucleotide
  modified_base 79: mod_base = OTHER; note = 2'-O-methyl ribonucleotide
  modified_base 80: mod_base = OTHER; note = 2'-O-methyl ribonucleotide
  modified_base 81: mod_base = OTHER; note = 2'-O-methyl ribonucleotide
  modified_base 83: mod_base = OTHER; note = 2'-O-methyl ribonucleotide
  modified_base 84: mod_base = OTHER; note = 2'-O-methyl ribonucleotide
  modified_base 85: mod_base = OTHER; note = 2'-O-methyl ribonucleotide
  modified_base 86: mod_base = OTHER; note = 2'-O-methyl ribonucleotide
  modified_base 87: mod_base = OTHER; note = 2'-O-methyl ribonucleotide
  modified_base 88: mod_base = OTHER; note = 2'-O-methyl ribonucleotide
  modified_base 89: mod_base = OTHER; note = 2'-O-methyl ribonucleotide
  modified_base 90: mod_base = OTHER; note = 2'-O-methyl ribonucleotide
  modified_base 91: mod_base = OTHER; note = 2'-O-methyl ribonucleotide
  modified_base 92: mod_base = OTHER; note = 2'-O-methyl ribonucleotide
  modified_base 93: mod_base = OTHER; note = 2'-O-methyl ribonucleotide
  modified_base 94: mod_base = OTHER; note = 2'-O-methyl ribonucleotide
  modified_base 95: mod_base = OTHER; note = 2'-O-methyl ribonucleotide
  modified_base 96: mod_base = OTHER; note = 2'-O-methyl ribonucleotide
  modified_base 97: mod_base = OTHER; note = 2'-O-methyl ribonucleotide
  modified_base 98: mod_base = OTHER; note = 2'-O-methyl ribonucleotide
  modified_base 99: mod_base = OTHER; note = 2'-O-methyl ribonucleotide
  modified_base 100: mod_base = OTHER; note = 2'-O-methyl ribonucleotide
  modified_base 101: mod_base = OTHER; note = uniform ribonucleotides (A, C, G, inosine or U), deoxynucleotides (A, G, C, inosine or T), ribonebularine, 2'-O-methylnebularine or deoxynebularine
  modified_base 102: mod_base = OTHER; note = uniform ribonucleotides (A, C, G, inosine or U), deoxynucleotides (A, G, C, inosine or T), ribonebularine, 2'-O-methylnebularine or deoxynebularine
  modified_base 103: mod_base = OTHER; note = uniform ribonucleotides (A, C, G, inosine or U), deoxynucleotides (A, G, C, inosine or T), ribonebularine, 2'-O-methylnebularine or deoxynebularine
  modified_base 1..4: mod_base = OTHER; note = phosphorothioate linkage
  modified_base 64..65: mod_base = OTHER; note = phosphorothioate linkage
  modified_base 98..100: mod_base = OTHER; note = phosphorothioate linkage
  misc_feature 1..100: note = RNA
  misc_feature 101..103: note = Optionally DNA or RNA

SEQ ID NO: 2989 - DNA, 103 bp, synthetic construct; identical to SEQ ID NO: 1795
  source 1..103: mol_type = other DNA
  modified_base 1: mod_base = OTHER; note = 2'-O-methyl ribonucleotide
  modified_base 2: mod_base = OTHER; note = 2'-O-methyl ribonucleotide
  modified_base 3: mod_base = OTHER; note = 2'-O-methyl ribonucleotide
  modified_base 21: mod_base = OTHER; note = 2'-O-methyl ribonucleotide
  modified_base 28: mod_base = OTHER; note = 2'-O-methyl ribonucleotide
  modified_base 29: mod_base = OTHER; note = 2'-O-methyl ribonucleotide
  modified_base 30: mod_base = OTHER; note = 2'-O-methyl ribonucleotide
  modified_base 31: mod_base = OTHER; note = 2'-O-methyl ribonucleotide
  modified_base 32: mod_base = OTHER; note = 2'-O-methyl ribonucleotide
  modified_base 34: mod_base = OTHER; note = 2'-O-methyl ribonucleotide
  modified_base 35: mod_base = OTHER; note = 2'-O-methyl ribonucleotide
  modified_base 36: mod_base = OTHER; note = 2'-O-methyl ribonucleotide
  modified_base 37: mod_base = OTHER; note = 2'-O-methyl ribonucleotide
  modified_base 38: mod_base = OTHER; note = 2'-O-methyl ribonucleotide
  modified_base 39: mod_base = OTHER; note = 2'-O-methyl ribonucleotide
  modified_base 40: mod_base = OTHER; note = 2'-O-methyl ribonucleotide
  modified_base 41: mod_base = OTHER; note = 2'-O-methyl ribonucleotide
  modified_base 42: mod_base = OTHER; note = 2'-O-methyl ribonucleotide
  modified_base 46: mod_base = OTHER; note = 2'-O-methyl ribonucleotide
  modified_base 48: mod_base = OTHER; note = 2'-O-methyl ribonucleotide
  modified_base 50: mod_base = OTHER; note = 2'-O-methyl ribonucleotide
  modified_base 52: mod_base = OTHER; note = 2'-O-methyl ribonucleotide
  modified_base 53: mod_base = OTHER; note = 2'-O-methyl ribonucleotide
  modified_base 54: mod_base = OTHER; note = 2'-O-methyl ribonucleotide
  modified_base 55: mod_base = OTHER; note = 2'-O-methyl ribonucleotide
  modified_base 56: mod_base = OTHER; note = 2'-O-methyl ribonucleotide
  modified_base 57: mod_base = OTHER; note = 2'-O-methyl ribonucleotide
  modified_base 60: mod_base = OTHER; note = 2'-O-methyl ribonucleotide
  modified_base 61: mod_base = OTHER; note = 2'-O-methyl ribonucleotide
  modified_base 66: mod_base = OTHER; note = 2'-O-methyl ribonucleotide
  modified_base 67: mod_base = OTHER; note = 2'-O-methyl ribonucleotide
  modified_base 70: mod_base = OTHER; note = 2'-O-methyl ribonucleotide
  modified_base 71: mod_base = OTHER; note = 2'-O-methyl ribonucleotide
  modified_base 72: mod_base = OTHER; note = 2'-O-methyl ribonucleotide
  modified_base 74: mod_base = OTHER; note = 2'-O-methyl ribonucleotide
  modified_base 75: mod_base = OTHER; note = 2'-O-methyl ribonucleotide
  modified_base 76: mod_base = OTHER; note = 2'-O-methyl ribonucleotide
  modified_base 77: mod_base = OTHER; note = 2'-O-methyl ribonucleotide
  modified_base 78: mod_base = OTHER; note = 2'-O-methyl ribonucleotide
  modified_base 79: mod_base = OTHER; note = 2'-O-methyl ribonucleotide
  modified_base 80: mod_base = OTHER; note = 2'-O-methyl ribonucleotide
  modified_base 81: mod_base = OTHER; note = 2'-O-methyl ribonucleotide
  modified_base 83: mod_base = OTHER; note = 2'-O-methyl ribonucleotide
  modified_base 84: mod_base = OTHER; note = 2'-O-methyl ribonucleotide
  modified_base 85: mod_base = OTHER; note = 2'-O-methyl ribonucleotide
  modified_base 86: mod_base = OTHER; note = 2'-O-methyl ribonucleotide
  modified_base 87: mod_base = OTHER; note = 2'-O-methyl ribonucleotide
  modified_base 88: mod_base = OTHER; note = 2'-O-methyl ribonucleotide
  modified_base 89: mod_base = OTHER; note = 2'-O-methyl ribonucleotide
  modified_base 90: mod_base = OTHER; note = 2'-O-methyl ribonucleotide
  modified_base 91: mod_base = OTHER; note = 2'-O-methyl ribonucleotide
  modified_base 92: mod_base = OTHER; note = 2'-O-methyl ribonucleotide
  modified_base 93: mod_base = OTHER; note = 2'-O-methyl ribonucleotide
  modified_base 94: mod_base = OTHER; note = 2'-O-methyl ribonucleotide
  modified_base 95: mod_base = OTHER; note = 2'-O-methyl ribonucleotide
  modified_base 96: mod_base = OTHER; note = 2'-O-methyl ribonucleotide
  modified_base 97: mod_base = OTHER; note = 2'-O-methyl ribonucleotide
  modified_base 98: mod_base = OTHER; note = 2'-O-methyl ribonucleotide
  modified_base 99: mod_base = OTHER; note = 2'-O-methyl ribonucleotide
  modified_base 100: mod_base = OTHER; note = 2'-O-methyl ribonucleotide
  modified_base 101: mod_base = OTHER; note = uniform ribonucleotides (A, C, G, inosine or U), deoxynucleotides (A, G, C, inosine or T), ribonebularine, 2'-O-methylnebularine or deoxynebularine
  modified_base 102: mod_base = OTHER; note = uniform ribonucleotides (A, C, G, inosine or U), deoxynucleotides (A, G, C, inosine or T), ribonebularine, 2'-O-methylnebularine or deoxynebularine
  modified_base 103: mod_base = OTHER; note = uniform ribonucleotides (A, C, G, inosine or U), deoxynucleotides (A, G, C, inosine or T), ribonebularine, 2'-O-methylnebularine or deoxynebularine
  modified_base 1..4: mod_base = OTHER; note = phosphorothioate linkage
  modified_base 64..65: mod_base = OTHER; note = phosphorothioate linkage
  modified_base 98..100: mod_base = OTHER; note = phosphorothioate linkage
  misc_feature 1..100: note = RNA
  misc_feature 101..103: note = Optionally DNA or RNA

SEQ ID NO: 2990 - DNA, 103 bp, synthetic construct; identical to SEQ ID NO: 1796
  source 1..103: mol_type = other DNA
  modified_base 1: mod_base = OTHER; note = 2'-O-methyl ribonucleotide
  modified_base 2: mod_base = OTHER; note = 2'-O-methyl ribonucleotide
  modified_base 3: mod_base = OTHER; note = 2'-O-methyl ribonucleotide
  modified_base 21: mod_base = OTHER; note = 2'-O-methyl ribonucleotide
  modified_base 28: mod_base = OTHER; note = 2'-O-methyl ribonucleotide
  modified_base 29: mod_base = OTHER; note = 2'-O-methyl ribonucleotide
  modified_base 30: mod_base = OTHER; note = 2'-O-methyl ribonucleotide
  modified_base 31: mod_base = OTHER; note = 2'-O-methyl ribonucleotide
  modified_base 32: mod_base = OTHER; note = 2'-O-methyl ribonucleotide
  modified_base 33: mod_base = OTHER; note = 2'-O-methyl ribonucleotide
  modified_base 34: mod_base = OTHER; note = 2'-O-methyl ribonucleotide
  modified_base 35: mod_base = OTHER; note = 2'-O-methyl ribonucleotide
  modified_base 36: mod_base = OTHER; note = 2'-O-methyl ribonucleotide
  modified_base 37: mod_base = OTHER; note = 2'-O-methyl ribonucleotide
  modified_base 38: mod_base = OTHER; note = 2'-O-methyl ribonucleotide
  modified_base 39: mod_base = OTHER; note = 2'-O-methyl ribonucleotide
  modified_base 40: mod_base = OTHER; note = 2'-O-methyl ribonucleotide
  modified_base 41: mod_base = OTHER; note = 2'-O-methyl ribonucleotide
  modified_base 42: mod_base = OTHER; note = 2'-O-methyl ribonucleotide
  modified_base 46: mod_base = OTHER; note = 2'-O-methyl ribonucleotide
  modified_base 48: mod_base = OTHER; note = 2'-O-methyl ribonucleotide
  modified_base 50: mod_base = OTHER; note = 2'-O-methyl ribonucleotide
  modified_base 52: mod_base = OTHER; note = 2'-O-methyl ribonucleotide
  modified_base 53: mod_base = OTHER; note = 2'-O-methyl ribonucleotide
  modified_base 54: mod_base = OTHER; note = 2'-O-methyl ribonucleotide
  modified_base 55: mod_base = OTHER; note = 2'-O-methyl ribonucleotide
  modified_base 56: mod_base = OTHER; note = 2'-O-methyl ribonucleotide
  modified_base 57: mod_base = OTHER; note = 2'-O-methyl ribonucleotide
  modified_base 60: mod_base = OTHER; note = 2'-O-methyl ribonucleotide
  modified_base 61: mod_base = OTHER; note = 2'-O-methyl ribonucleotide
  modified_base 66: mod_base = OTHER; note = 2'-O-methyl ribonucleotide
  modified_base 67: mod_base = OTHER; note = 2'-O-methyl ribonucleotide
  modified_base 70: mod_base = OTHER; note = 2'-O-methyl ribonucleotide
  modified_base 71: mod_base = OTHER; note = 2'-O-methyl ribonucleotide
  modified_base 72: mod_base = OTHER; note = 2'-O-methyl ribonucleotide
  modified_base 73: mod_base = OTHER; note = 2'-O-methyl ribonucleotide
  modified_base 74: mod_base = OTHER; note = 2'-O-methyl ribonucleotide
  modified_base 75: mod_base = OTHER; note = 2'-O-methyl ribonucleotide
  modified_base 76: mod_base = OTHER; note = 2'-O-methyl ribonucleotide
  modified_base 77: mod_base = OTHER; note = 2'-O-methyl ribonucleotide
  modified_base 78: mod_base = OTHER; note = 2'-O-methyl ribonucleotide
  modified_base 79: mod_base = OTHER; note = 2'-O-methyl ribonucleotide
  modified_base 80: mod_base = OTHER; note = 2'-O-methyl ribonucleotide
  modified_base 81: mod_base = OTHER; note = 2'-O-methyl ribonucleotide
  modified_base 83: mod_base = OTHER; note = 2'-O-methyl ribonucleotide
  modified_base 84: mod_base = OTHER; note = 2'-O-methyl ribonucleotide
  modified_base 85: mod_base = OTHER; note = 2'-O-methyl ribonucleotide
  modified_base 86: mod_base = OTHER; note = 2'-O-methyl ribonucleotide
  modified_base 87: mod_base = OTHER; note = 2'-O-methyl ribonucleotide
  modified_base 88: mod_base = OTHER; note = 2'-O-methyl ribonucleotide
  modified_base 89: mod_base = OTHER; note = 2'-O-methyl ribonucleotide
  modified_base 90: mod_base = OTHER; note = 2'-O-methyl ribonucleotide
  modified_base 91: mod_base = OTHER; note = 2'-O-methyl ribonucleotide
  modified_base 92: mod_base = OTHER; note = 2'-O-methyl ribonucleotide
  modified_base 93: mod_base = OTHER; note = 2'-O-methyl ribonucleotide
  modified_base 94: mod_base = OTHER; note = 2'-O-methyl ribonucleotide
  modified_base 95: mod_base = OTHER; note = 2'-O-methyl ribonucleotide
  modified_base 96: mod_base = OTHER; note = 2'-O-methyl ribonucleotide
  modified_base 97: mod_base = OTHER; note = 2'-O-methyl ribonucleotide
  modified_base 98: mod_base = OTHER; note = 2'-O-methyl ribonucleotide
  modified_base 99: mod_base = OTHER; note = 2'-O-methyl ribonucleotide
  modified_base 100: mod_base = OTHER; note = 2'-O-methyl ribonucleotide
  modified_base 101: mod_base = OTHER; note = uniform ribonucleotides (A, C, G, inosine or U), deoxynucleotides (A, G, C, inosine or T), ribonebularine, 2'-O-methylnebularine or deoxynebularine
  modified_base 102: mod_base = OTHER; note = uniform ribonucleotides (A, C, G, inosine or U), deoxynucleotides (A, G, C, inosine or T), ribonebularine, 2'-O-methylnebularine or deoxynebularine
  modified_base 103: mod_base = OTHER; note = uniform ribonucleotides (A, C, G, inosine or U), deoxynucleotides (A, G, C, inosine or T), ribonebularine, 2'-O-methylnebularine or deoxynebularine
  modified_base 1..4: mod_base = OTHER; note = phosphorothioate linkage
  modified_base 64..65: mod_base = OTHER; note = phosphorothioate linkage
  modified_base 98..100: mod_base = OTHER; note = phosphorothioate linkage
  misc_feature 1..100: note = RNA
  misc_feature 101..103: note = Optionally DNA or RNA

SEQ ID NO: 2991 - DNA, 103 bp, synthetic construct; identical to SEQ ID NO: 1796
  source 1..103: mol_type = other DNA
  modified_base 1: mod_base = OTHER; note = 2'-O-methyl ribonucleotide
  modified_base 2: mod_base = OTHER; note = 2'-O-methyl ribonucleotide
  modified_base 3: mod_base = OTHER; note = 2'-O-methyl ribonucleotide
  modified_base 21: mod_base = OTHER; note = 2'-O-methyl ribonucleotide
  modified_base 28: mod_base = OTHER; note = 2'-O-methyl ribonucleotide
  modified_base 29: mod_base = OTHER; note = 2'-O-methyl ribonucleotide
  modified_base 30: mod_base = OTHER; note = 2'-O-methyl ribonucleotide
  modified_base 31: mod_base = OTHER; note = 2'-O-methyl ribonucleotide
  modified_base 32: mod_base = OTHER; note = 2'-O-methyl ribonucleotide
  modified_base 34: mod_base = OTHER; note = 2'-O-methyl ribonucleotide
  modified_base 35: mod_base = OTHER; note = 2'-O-methyl ribonucleotide
  modified_base 36: mod_base = OTHER; note = 2'-O-methyl ribonucleotide
  modified_base 37: mod_base = OTHER; note = 2'-O-methyl ribonucleotide
  modified_base 38: mod_base = OTHER; note = 2'-O-methyl ribonucleotide
  modified_base 39: mod_base = OTHER; note = 2'-O-methyl ribonucleotide
  modified_base 40: mod_base = OTHER; note = 2'-O-methyl ribonucleotide
  modified_base 41: mod_base = OTHER; note = 2'-O-methyl ribonucleotide
  modified_base 42: mod_base = OTHER; note = 2'-O-methyl ribonucleotide
  modified_base 46: mod_base = OTHER; note = 2'-O-methyl ribonucleotide
  modified_base 48: mod_base = OTHER; note = 2'-O-methyl ribonucleotide
  modified_base 50: mod_base = OTHER; note = 2'-O-methyl ribonucleotide
  modified_base 52: mod_base = OTHER; note = 2'-O-methyl ribonucleotide
  modified_base 53: mod_base = OTHER; note = 2'-O-methyl ribonucleotide
  modified_base 54: mod_base = OTHER; note = 2'-O-methyl ribonucleotide
  modified_base 55: mod_base = OTHER; note = 2'-O-methyl ribonucleotide
  modified_base 56: mod_base = OTHER; note = 2'-O-methyl ribonucleotide
  modified_base 57: mod_base = OTHER; note = 2'-O-methyl ribonucleotide
  modified_base 60: mod_base = OTHER; note = 2'-O-methyl ribonucleotide
  modified_base 61: mod_base = OTHER; note = 2'-O-methyl ribonucleotide
  modified_base 66: mod_base = OTHER; note = 2'-O-methyl ribonucleotide
  modified_base 67: mod_base = OTHER; note = 2'-O-methyl ribonucleotide
  modified_base 70: mod_base = OTHER; note = 2'-O-methyl ribonucleotide
  modified_base 71: mod_base = OTHER; note = 2'-O-methyl ribonucleotide
  modified_base 72: mod_base = OTHER; note = 2'-O-methyl ribonucleotide
  modified_base 74: mod_base = OTHER; note = 2'-O-methyl ribonucleotide
  modified_base 75: mod_base = OTHER; note = 2'-O-methyl ribonucleotide
  modified_base 76: mod_base = OTHER; note = 2'-O-methyl ribonucleotide
  modified_base 77: mod_base = OTHER; note = 2'-O-methyl ribonucleotide
  modified_base 78: mod_base = OTHER; note = 2'-O-methyl ribonucleotide
  modified_base 79: mod_base = OTHER; note = 2'-O-methyl ribonucleotide
  modified_base 80: mod_base = OTHER; note = 2'-O-methyl ribonucleotide
  modified_base 81: mod_base = OTHER; note = 2'-O-methyl ribonucleotide
  modified_base 83: mod_base = OTHER; note = 2'-O-methyl ribonucleotide
  modified_base 84: mod_base = OTHER; note = 2'-O-methyl ribonucleotide
  modified_base 85: mod_base = OTHER; note = 2'-O-methyl ribonucleotide
  modified_base 86: mod_base = OTHER; note = 2'-O-methyl ribonucleotide
  modified_base 87: mod_base = OTHER; note = 2'-O-methyl ribonucleotide
  modified_base 88: mod_base = OTHER; note = 2'-O-methyl ribonucleotide
  modified_base 89: mod_base = OTHER; note = 2'-O-methyl ribonucleotide
  modified_base 90: mod_base = OTHER; note = 2'-O-methyl ribonucleotide
  modified_base 91: mod_base = OTHER; note = 2'-O-methyl ribonucleotide
  modified_base 92: mod_base = OTHER; note = 2'-O-methyl ribonucleotide
  modified_base 93: mod_base = OTHER; note = 2'-O-methyl ribonucleotide
  modified_base 94: mod_base = OTHER; note = 2'-O-methyl ribonucleotide
  modified_base 95: mod_base = OTHER; note = 2'-O-methyl ribonucleotide
  modified_base 96: mod_base = OTHER; note = 2'-O-methyl ribonucleotide
  modified_base 97: mod_base = OTHER; note = 2'-O-methyl ribonucleotide
  modified_base 98: mod_base = OTHER; note = 2'-O-methyl ribonucleotide
  modified_base 99: mod_base = OTHER; note = 2'-O-methyl ribonucleotide
  modified_base 100: mod_base = OTHER; note = 2'-O-methyl ribonucleotide
  modified_base 101: mod_base = OTHER; note = uniform ribonucleotides (A, C, G, inosine or U), deoxynucleotides (A, G, C, inosine or T), ribonebularine, 2'-O-methylnebularine or deoxynebularine
  modified_base 102: mod_base = OTHER; note = uniform ribonucleotides (A, C, G, inosine or U), deoxynucleotides (A, G, C, inosine or T), ribonebularine, 2'-O-methylnebularine or deoxynebularine
  modified_base 103: mod_base = OTHER; note = uniform ribonucleotides (A, C, G, inosine or U), deoxynucleotides (A, G, C, inosine or T), ribonebularine, 2'-O-methylnebularine or deoxynebularine
  modified_base 1..4: mod_base = OTHER; note = phosphorothioate linkage
  modified_base 64..65: mod_base = OTHER; note = phosphorothioate linkage
  modified_base 98..100: mod_base = OTHER; note = phosphorothioate linkage
  misc_feature 1..100: note = RNA
  misc_feature 101..103: note = Optionally DNA or RNA

SEQ ID NO: 2992 - DNA, 103 bp, synthetic construct; identical to SEQ ID NO: 1797
  source 1..103: mol_type = other DNA
  modified_base 1: mod_base = OTHER; note = 2'-O-methyl ribonucleotide
  modified_base 2: mod_base = OTHER; note = 2'-O-methyl ribonucleotide
  modified_base 3: mod_base = OTHER; note = 2'-O-methyl ribonucleotide
  modified_base 21: mod_base = OTHER; note = 2'-O-methyl ribonucleotide
  modified_base 28: mod_base = OTHER; note = 2'-O-methyl ribonucleotide
  modified_base 29: mod_base = OTHER; note = 2'-O-methyl ribonucleotide
  modified_base 30: mod_base = OTHER; note = 2'-O-methyl ribonucleotide
  modified_base 31: mod_base = OTHER; note = 2'-O-methyl ribonucleotide
  modified_base 32: mod_base = OTHER; note = 2'-O-methyl ribonucleotide
  modified_base 33: mod_base = OTHER; note = 2'-O-methyl ribonucleotide
  modified_base 34: mod_base = OTHER; note = 2'-O-methyl ribonucleotide
  modified_base 35: mod_base = OTHER; note = 2'-O-methyl ribonucleotide
  modified_base 36: mod_base = OTHER; note = 2'-O-methyl ribonucleotide
  modified_base 37: mod_base = OTHER; note = 2'-O-methyl ribonucleotide
  modified_base 38: mod_base = OTHER; note = 2'-O-methyl ribonucleotide
  modified_base 39: mod_base = OTHER; note = 2'-O-methyl ribonucleotide
  modified_base 40: mod_base = OTHER; note = 2'-O-methyl ribonucleotide
  modified_base 41: mod_base = OTHER; note = 2'-O-methyl ribonucleotide
  modified_base 42: mod_base = OTHER; note = 2'-O-methyl ribonucleotide
  modified_base 46: mod_base = OTHER; note = 2'-O-methyl ribonucleotide
  modified_base 48: mod_base = OTHER; note = 2'-O-methyl ribonucleotide
  modified_base 50: mod_base = OTHER; note = 2'-O-methyl ribonucleotide
  modified_base 52: mod_base = OTHER; note = 2'-O-methyl ribonucleotide
  modified_base 53: mod_base = OTHER; note = 2'-O-methyl ribonucleotide
  modified_base 54: mod_base = OTHER; note = 2'-O-methyl ribonucleotide
  modified_base 57: mod_base = OTHER; note = 2'-O-methyl ribonucleotide
  modified_base 61: mod_base = OTHER; note = 2'-O-methyl ribonucleotide
  modified_base 66: mod_base = OTHER; note = 2'-O-methyl ribonucleotide
  modified_base 67: mod_base = OTHER; note = 2'-O-methyl ribonucleotide
  modified_base 70: mod_base = OTHER; note = 2'-O-methyl ribonucleotide
  modified_base 71: mod_base = OTHER; note = 2'-O-methyl ribonucleotide
  modified_base 72: mod_base = OTHER; note = 2'-O-methyl ribonucleotide
  modified_base 74: mod_base = OTHER; note = 2'-O-methyl ribonucleotide
  modified_base 75: mod_base = OTHER; note = 2'-O-methyl ribonucleotide
  modified_base 76: mod_base = OTHER; note = 2'-O-methyl ribonucleotide
  modified_base 77: mod_base = OTHER; note = 2'-O-methyl ribonucleotide
  modified_base 78: mod_base = OTHER; note = 2'-O-methyl ribonucleotide
  modified_base 79: mod_base = OTHER; note = 2'-O-methyl ribonucleotide
  modified_base 80: mod_base = OTHER; note = 2'-O-methyl ribonucleotide
  modified_base 82: mod_base = OTHER; note = 2'-O-methyl ribonucleotide
  modified_base 83: mod_base = OTHER; note = 2'-O-methyl ribonucleotide
  modified_base 84: mod_base = OTHER; note = 2'-O-methyl ribonucleotide
  modified_base 85: mod_base = OTHER; note = 2'-O-methyl ribonucleotide
  modified_base 86: mod_base = OTHER; note = 2'-O-methyl ribonucleotide
  modified_base 87: mod_base = OTHER; note = 2'-O-methyl ribonucleotide
  modified_base 89: mod_base = OTHER; note = 2'-O-methyl ribonucleotide
  modified_base 92: mod_base = OTHER; note = 2'-O-methyl ribonucleotide
  modified_base 93: mod_base = OTHER; note = 2'-O-methyl ribonucleotide
  modified_base 94: mod_base = OTHER; note = 2'-O-methyl ribonucleotide
  modified_base 95: mod_base = OTHER; note = 2'-O-methyl ribonucleotide
  modified_base 96: mod_base = OTHER; note = 2'-O-methyl ribonucleotide
  modified_base 97: mod_base = OTHER; note = 2'-O-methyl ribonucleotide
  modified_base 98: mod_base = OTHER; note = 2'-O-methyl ribonucleotide
  modified_base 99: mod_base = OTHER; note = 2'-O-methyl ribonucleotide
  modified_base 100: mod_base = OTHER; note = 2'-O-methyl ribonucleotide
  modified_base 101: mod_base = OTHER; note = uniform ribonucleotides (A, C, G, inosine or U), deoxynucleotides (A, G, C, inosine or T), ribonebularine, 2'-O-methylnebularine or deoxynebularine
  modified_base 102: mod_base = OTHER; note = uniform ribonucleotides (A, C, G, inosine or U), deoxynucleotides (A, G, C, inosine or T), ribonebularine, 2'-O-methylnebularine or deoxynebularine
  modified_base 103: mod_base = OTHER; note = uniform ribonucleotides (A, C, G, inosine or U), deoxynucleotides (A, G, C, inosine or T), ribonebularine, 2'-O-methylnebularine or deoxynebularine
  modified_base 1..4: mod_base = OTHER; note = phosphorothioate linkage
  modified_base 64..65: mod_base = OTHER; note = phosphorothioate linkage
  modified_base 98..100: mod_base = OTHER; note = phosphorothioate linkage
  misc_feature 1..100: note = RNA
  misc_feature 101..103: note = Optionally DNA or RNA

SEQ ID NO: 2993 - DNA, 103 bp, synthetic construct; identical to SEQ ID NO: 1797
  source 1..103: mol_type = other DNA
  modified_base 1: mod_base = OTHER; note = 2'-O-methyl ribonucleotide
  modified_base 2: mod_base = OTHER; note = 2'-O-methyl ribonucleotide
  modified_base 3: mod_base = OTHER; note = 2'-O-methyl ribonucleotide
  modified_base 21: mod_base = OTHER; note = 2'-O-methyl ribonucleotide
  modified_base 28: mod_base = OTHER; note = 2'-O-methyl ribonucleotide
  modified_base 29: mod_base = OTHER; note = 2'-O-methyl ribonucleotide
  modified_base 30: mod_base = OTHER; note = 2'-O-methyl ribonucleotide
  modified_base 31: mod_base = OTHER; note = 2'-O-methyl ribonucleotide
  modified_base 32: mod_base = OTHER; note = 2'-O-methyl ribonucleotide
  modified_base 33: mod_base = OTHER; note = 2'-O-methyl ribonucleotide
  modified_base 34: mod_base = OTHER; note = 2'-O-methyl ribonucleotide
  modified_base 35: mod_base = OTHER; note = 2'-O-methyl ribonucleotide
  modified_base 36: mod_base = OTHER; note = 2'-O-methyl ribonucleotide
  modified_base 37: mod_base = OTHER; note = 2'-O-methyl ribonucleotide
  modified_base 38: mod_base = OTHER; note = 2'-O-methyl ribonucleotide
  modified_base 39: mod_base = OTHER; note = 2'-O-methyl ribonucleotide
  modified_base 40: mod_base = OTHER; note = 2'-O-methyl ribonucleotide
  modified_base 41: mod_base = OTHER; note = 2'-O-methyl ribonucleotide
  modified_base 42: mod_base = OTHER; note = 2'-O-methyl ribonucleotide
  modified_base 46: mod_base = OTHER; note = 2'-O-methyl ribonucleotide
  modified_base 48: mod_base = OTHER; note = 2'-O-methyl ribonucleotide
  modified_base 50: mod_base = OTHER; note = 2'-O-methyl ribonucleotide
  modified_base 52: mod_base = OTHER; note = 2'-O-methyl ribonucleotide
  modified_base 53: mod_base = OTHER; note = 2'-O-methyl ribonucleotide
  modified_base 54: mod_base = OTHER; note = 2'-O-methyl ribonucleotide
  modified_base 55: mod_base = OTHER; note = 2'-O-methyl ribonucleotide
  modified_base 56: mod_base = OTHER; note = 2'-O-methyl ribonucleotide
  modified_base 57: mod_base = OTHER; note = 2'-O-methyl ribonucleotide
  modified_base 60: mod_base = OTHER; note = 2'-O-methyl ribonucleotide
  modified_base 61: mod_base = OTHER; note = 2'-O-methyl ribonucleotide
  modified_base 66: mod_base = OTHER; note = 2'-O-methyl ribonucleotide
  modified_base 67: mod_base = OTHER; note = 2'-O-methyl ribonucleotide
  modified_base 70: mod_base = OTHER; note = 2'-O-methyl ribonucleotide
  modified_base 71: mod_base = OTHER; note = 2'-O-methyl ribonucleotide
  modified_base 72: mod_base = OTHER; note = 2'-O-methyl ribonucleotide
  modified_base 74: mod_base = OTHER; note = 2'-O-methyl ribonucleotide
  modified_base 75: mod_base = OTHER; note = 2'-O-methyl ribonucleotide
  modified_base 76: mod_base = OTHER; note = 2'-O-methyl ribonucleotide
  modified_base 77: mod_base = OTHER; note = 2'-O-methyl ribonucleotide
  modified_base 78: mod_base = OTHER; note = 2'-O-methyl ribonucleotide
  modified_base 79: mod_base = OTHER; note = 2'-O-methyl ribonucleotide
  modified_base 80: mod_base = OTHER; note = 2'-O-methyl ribonucleotide
  modified_base 82: mod_base = OTHER; note = 2'-O-methyl ribonucleotide
  modified_base 83: mod_base = OTHER; note = 2'-O-methyl ribonucleotide
  modified_base 84: mod_base = OTHER; note = 2'-O-methyl ribonucleotide
  modified_base 85: mod_base = OTHER; note = 2'-O-methyl ribonucleotide
  modified_base 86: mod_base = OTHER; note = 2'-O-methyl ribonucleotide
  modified_base 87: mod_base = OTHER; note = 2'-O-methyl ribonucleotide
  modified_base 89: mod_base = OTHER; note = 2'-O-methyl ribonucleotide
  modified_base 92: mod_base = OTHER; note = 2'-O-methyl ribonucleotide
  modified_base 93: mod_base = OTHER; note = 2'-O-methyl ribonucleotide
  modified_base 94: mod_base = OTHER; note = 2'-O-methyl ribonucleotide
  modified_base 95: mod_base = OTHER; note = 2'-O-methyl ribonucleotide
  modified_base 96: mod_base = OTHER; note = 2'-O-methyl ribonucleotide
  modified_base 97: mod_base = OTHER; note = 2'-O-methyl ribonucleotide
  modified_base 98: mod_base = OTHER; note = 2'-O-methyl ribonucleotide
  modified_base 99: mod_base = OTHER; note = 2'-O-methyl ribonucleotide
  modified_base 100: mod_base = OTHER; note = 2'-O-methyl ribonucleotide
  modified_base 101: mod_base = OTHER; note = uniform ribonucleotides (A, C, G, inosine or U), deoxynucleotides (A, G, C, inosine or T), ribonebularine, 2'-O-methylnebularine or deoxynebularine
  modified_base 102: mod_base = OTHER; note = uniform ribonucleotides (A, C, G, inosine or U), deoxynucleotides (A, G, C, inosine or T), ribonebularine, 2'-O-methylnebularine or deoxynebularine
  modified_base 103: mod_base = OTHER; note = uniform ribonucleotides (A, C, G, inosine or U), deoxynucleotides (A, G, C, inosine or T), ribonebularine, 2'-O-methylnebularine or deoxynebularine
  modified_base 1..4: mod_base = OTHER; note = phosphorothioate linkage
  modified_base 64..65: mod_base = OTHER; note = phosphorothioate linkage
  modified_base 98..100: mod_base = OTHER; note = phosphorothioate linkage
  misc_feature 1..100: note = RNA
  misc_feature 101..103: note = Optionally DNA or RNA

SEQ ID NO: 2994 - DNA, 103 bp, synthetic construct; identical to SEQ ID NO: 1797
  source 1..103: mol_type = other DNA
  modified_base 1: mod_base = OTHER; note = 2'-O-methyl ribonucleotide
  modified_base 2: mod_base = OTHER; note = 2'-O-methyl ribonucleotide
  modified_base 3: mod_base = OTHER; note = 2'-O-methyl ribonucleotide
  modified_base 21: mod_base = OTHER; note = 2'-O-methyl ribonucleotide
  modified_base 28: mod_base = OTHER; note = 2'-O-methyl ribonucleotide
  modified_base 29: mod_base = OTHER; note = 2'-O-methyl ribonucleotide
  modified_base 30: mod_base = OTHER; note = 2'-O-methyl ribonucleotide
  modified_base 31: mod_base = OTHER; note = 2'-O-methyl ribonucleotide
  modified_base 32: mod_base = OTHER; note = 2'-O-methyl ribonucleotide
  modified_base 33: mod_base = OTHER; note = 2'-O-methyl ribonucleotide
  modified_base 34: mod_base = OTHER; note = 2'-O-methyl ribonucleotide
  modified_base 35: mod_base = OTHER; note = 2'-O-methyl ribonucleotide
  modified_base 36: mod_base = OTHER; note = 2'-O-methyl ribonucleotide
  modified_base 37: mod_base = OTHER; note = 2'-O-methyl ribonucleotide
  modified_base 38: mod_base = OTHER; note = 2'-O-methyl ribonucleotide
  modified_base 39: mod_base = OTHER; note = 2'-O-methyl ribonucleotide
  modified_base 40: mod_base = OTHER; note = 2'-O-methyl ribonucleotide
  modified_base 41: mod_base = OTHER; note = 2'-O-methyl ribonucleotide
  modified_base 42: mod_base = OTHER; note = 2'-O-methyl ribonucleotide
  modified_base 46: mod_base = OTHER; note = 2'-O-methyl ribonucleotide
  modified_base 48: mod_base = OTHER; note = 2'-O-methyl ribonucleotide
  modified_base 50: mod_base = OTHER; note = 2'-O-methyl ribonucleotide
  modified_base 52: mod_base = OTHER; note = 2'-O-methyl ribonucleotide
  modified_base 53: mod_base = OTHER; note = 2'-O-methyl ribonucleotide
  modified_base 54: mod_base = OTHER; note = 2'-O-methyl ribonucleotide
  modified_base 57: mod_base = OTHER; note = 2'-O-methyl ribonucleotide
  modified_base 61: mod_base = OTHER; note = 2'-O-methyl ribonucleotide
  modified_base 66: mod_base = OTHER; note = 2'-O-methyl ribonucleotide
  modified_base 67: mod_base = OTHER; note = 2'-O-methyl ribonucleotide
  modified_base 70: mod_base = OTHER; note = 2'-O-methyl ribonucleotide
  modified_base 71: mod_base = OTHER; note = 2'-O-methyl ribonucleotide
  modified_base 72: mod_base = OTHER; note = 2'-O-methyl ribonucleotide
  modified_base 73: mod_base = OTHER; note = 2'-O-methyl ribonucleotide
  modified_base 74: mod_base = OTHER; note = 2'-O-methyl ribonucleotide
  modified_base 75: mod_base = OTHER; note = 2'-O-methyl ribonucleotide
  modified_base 76: mod_base = OTHER; note = 2'-O-methyl ribonucleotide
  modified_base 77: mod_base = OTHER; note = 2'-O-methyl ribonucleotide
  modified_base 78: mod_base = OTHER; note = 2'-O-methyl ribonucleotide
  modified_base 79: mod_base = OTHER; note = 2'-O-methyl ribonucleotide
  modified_base 80: mod_base = OTHER; note = 2'-O-methyl ribonucleotide
  modified_base 82: mod_base = OTHER; note = 2'-O-methyl ribonucleotide
  modified_base 83: mod_base = OTHER; note = 2'-O-methyl ribonucleotide
  modified_base 84: mod_base = OTHER; note = 2'-O-methyl ribonucleotide
  modified_base 85: mod_base = OTHER; note = 2'-O-methyl ribonucleotide
  modified_base 86: mod_base = OTHER; note = 2'-O-methyl ribonucleotide
  modified_base 87: mod_base = OTHER; note = 2'-O-methyl ribonucleotide
  modified_base 89: mod_base = OTHER; note = 2'-O-methyl ribonucleotide
  modified_base 92: mod_base = OTHER; note = 2'-O-methyl ribonucleotide
  modified_base 93: mod_base = OTHER; note = 2'-O-methyl ribonucleotide
  modified_base 94: mod_base = OTHER; note = 2'-O-methyl ribonucleotide
  modified_base 95: mod_base = OTHER; note = 2'-O-methyl ribonucleotide
  modified_base 96: mod_base = OTHER; note = 2'-O-methyl ribonucleotide
  modified_base 97: mod_base = OTHER; note = 2'-O-methyl ribonucleotide
  modified_base 98: mod_base = OTHER; note = 2'-O-methyl ribonucleotide
  modified_base 99: mod_base = OTHER; note = 2'-O-methyl ribonucleotide
  modified_base 100: mod_base = OTHER; note = 2'-O-methyl ribonucleotide
  modified_base 101: mod_base = OTHER; note = uniform ribonucleotides (A, C, G, inosine or U), deoxynucleotides (A, G, C, inosine or T), ribonebularine, 2'-O-methylnebularine or deoxynebularine
  modified_base 102: mod_base = OTHER; note = uniform ribonucleotides (A, C, G, inosine or U), deoxynucleotides (A, G, C, inosine or T), ribonebularine, 2'-O-methylnebularine or deoxynebularine
  modified_base 103: mod_base = OTHER; note = uniform ribonucleotides (A, C, G, inosine or U), deoxynucleotides (A, G, C, inosine or T), ribonebularine, 2'-O-methylnebularine or deoxynebularine
  modified_base 1..4: mod_base = OTHER; note = phosphorothioate linkage
  modified_base 64..65: mod_base = OTHER; note = phosphorothioate linkage
  modified_base 98..100: mod_base = OTHER; note = phosphorothioate linkage
  misc_feature 1..100: note = RNA
  misc_feature 101..103: note = Optionally DNA or RNA

SEQ ID NO: 2995 - DNA, 103 bp, synthetic construct; identical to SEQ ID NO: 1797
  source 1..103: mol_type = other DNA
  modified_base 1: mod_base = OTHER; note = 2'-O-methyl ribonucleotide
  modified_base 2: mod_base = OTHER; note = 2'-O-methyl ribonucleotide
  modified_base 3: mod_base = OTHER; note = 2'-O-methyl ribonucleotide
  modified_base 21: mod_base = OTHER; note = 2'-O-methyl ribonucleotide
  modified_base 28: mod_base = OTHER; note = 2'-O-methyl ribonucleotide
  modified_base 29: mod_base = OTHER; note = 2'-O-methyl ribonucleotide
  modified_base 30: mod_base = OTHER; note = 2'-O-methyl ribonucleotide
  modified_base 31: mod_base = OTHER; note = 2'-O-methyl ribonucleotide
  modified_base 32: mod_base = OTHER; note = 2'-O-methyl ribonucleotide
  modified_base 33: mod_base = OTHER; note = 2'-O-methyl ribonucleotide
  modified_base 34: mod_base = OTHER; note = 2'-O-methyl ribonucleotide
  modified_base 35: mod_base = OTHER; note = 2'-O-methyl ribonucleotide
  modified_base 36: mod_base = OTHER; note = 2'-O-methyl ribonucleotide
  modified_base 37: mod_base = OTHER; note = 2'-O-methyl ribonucleotide
  modified_base 38: mod_base = OTHER; note = 2'-O-methyl ribonucleotide
  modified_base 39: mod_base = OTHER; note = 2'-O-methyl ribonucleotide
  modified_base 40: mod_base = OTHER; note = 2'-O-methyl ribonucleotide
  modified_base 41: mod_base = OTHER; note = 2'-O-methyl ribonucleotide
  modified_base 42: mod_base = OTHER; note = 2'-O-methyl ribonucleotide
  modified_base 46: mod_base = OTHER; note = 2'-O-methyl ribonucleotide
  modified_base 48: mod_base = OTHER; note = 2'-O-methyl ribonucleotide
  modified_base 50: mod_base = OTHER; note = 2'-O-methyl ribonucleotide
  modified_base 52: mod_base = OTHER; note = 2'-O-methyl ribonucleotide
  modified_base 53: mod_base = OTHER; note = 2'-O-methyl ribonucleotide
  modified_base 54: mod_base = OTHER; note = 2'-O-methyl ribonucleotide
  modified_base 57: mod_base = OTHER; note = 2'-O-methyl ribonucleotide
  modified_base 61: mod_base = OTHER; note = 2'-O-methyl ribonucleotide
  modified_base 66: mod_base = OTHER; note = 2'-O-methyl ribonucleotide
  modified_base 67: mod_base = OTHER; note = 2'-O-methyl ribonucleotide
  modified_base 70: mod_base = OTHER; note = 2'-O-methyl ribonucleotide
  modified_base 71: mod_base = OTHER; note = 2'-O-methyl ribonucleotide
  modified_base 72: mod_base = OTHER; note = 2'-O-methyl ribonucleotide
  modified_base 73: mod_base = OTHER; note = 2'-O-methyl ribonucleotide
  modified_base 74: mod_base = OTHER; note = 2'-O-methyl ribonucleotide
  modified_base 75: mod_base = OTHER; note = 2'-O-methyl ribonucleotide
  modified_base 76: mod_base = OTHER; note = 2'-O-methyl ribonucleotide
  modified_base 77: mod_base = OTHER; note = 2'-O-methyl ribonucleotide
  modified_base 78: mod_base = OTHER; note = 2'-O-methyl ribonucleotide
  modified_base 79: mod_base = OTHER; note = 2'-O-methyl ribonucleotide
  modified_base 80: mod_base = OTHER; note = 2'-O-methyl ribonucleotide
  modified_base 82: mod_base = OTHER; note = 2'-O-methyl ribonucleotide
  modified_base 83: mod_base = OTHER; note = 2'-O-methyl ribonucleotide
  modified_base 84: mod_base = OTHER; note = 2'-O-methyl ribonucleotide
  modified_base 85: mod_base = OTHER; note = 2'-O-methyl ribonucleotide
  modified_base 86: mod_base = OTHER; note = 2'-O-methyl ribonucleotide
  modified_base 87: mod_base = OTHER; note = 2'-O-methyl ribonucleotide
  modified_base 89: mod_base = OTHER; note = 2'-O-methyl ribonucleotide
  modified_base 91: mod_base = OTHER; note = 2'-O-methyl ribonucleotide
  modified_base 92: mod_base = OTHER; note = 2'-O-methyl ribonucleotide
  modified_base 93: mod_base = OTHER; note = 2'-O-methyl ribonucleotide
  modified_base 94: mod_base = OTHER; note = 2'-O-methyl ribonucleotide
  modified_base 95: mod_base = OTHER; note = 2'-O-methyl ribonucleotide
  modified_base 96: mod_base = OTHER; note = 2'-O-methyl ribonucleotide
  modified_base 97: mod_base = OTHER; note = 2'-O-methyl ribonucleotide
  modified_base 98: mod_base = OTHER; note = 2'-O-methyl ribonucleotide
  modified_base 99: mod_base = OTHER; note = 2'-O-methyl ribonucleotide
  modified_base 100: mod_base = OTHER; note = 2'-O-methyl ribonucleotide
  modified_base 101: mod_base = OTHER; note = uniform ribonucleotides (A, C, G, inosine or U), deoxynucleotides (A, G, C, inosine or T), ribonebularine, 2'-O-methylnebularine or deoxynebularine
  modified_base 102: mod_base = OTHER; note = uniform ribonucleotides (A, C, G, inosine or U), deoxynucleotides (A, G, C, inosine or T), ribonebularine, 2'-O-methylnebularine or deoxynebularine
  modified_base 103: mod_base = OTHER; note = uniform ribonucleotides (A, C, G, inosine or U), deoxynucleotides (A, G, C, inosine or T), ribonebularine, 2'-O-methylnebularine or deoxynebularine
  modified_base 1..4: mod_base = OTHER; note = phosphorothioate linkage
  modified_base 64..65: mod_base = OTHER; note = phosphorothioate linkage
  modified_base 98..100: mod_base = OTHER; note = phosphorothioate linkage
  misc_feature 1..100: note = RNA
  misc_feature 101..103: note = Optionally DNA or RNA

SEQ ID NO: 2996 - DNA, 103 bp, synthetic construct; identical to SEQ ID NO: 1797
  source 1..103: mol_type = other DNA
  modified_base 1: mod_base = OTHER; note = 2'-O-methyl ribonucleotide
  modified_base 2: mod_base = OTHER; note = 2'-O-methyl ribonucleotide
  modified_base 3: mod_base = OTHER; note = 2'-O-methyl ribonucleotide
  modified_base 21: mod_base = OTHER; note = 2'-O-methyl ribonucleotide
  modified_base 28: mod_base = OTHER; note = 2'-O-methyl ribonucleotide
  modified_base 29: mod_base = OTHER; note = 2'-O-methyl ribonucleotide
  modified_base 30: mod_base = OTHER; note = 2'-O-methyl ribonucleotide
  modified_base 31: mod_base = OTHER; note = 2'-O-methyl ribonucleotide
  modified_base 32: mod_base = OTHER; note = 2'-O-methyl ribonucleotide
  modified_base 34: mod_base = OTHER; note = 2'-O-methyl ribonucleotide
  modified_base 35: mod_base = OTHER; note = 2'-O-methyl ribonucleotide
  modified_base 36: mod_base = OTHER; note = 2'-O-methyl ribonucleotide
  modified_base 37: mod_base = OTHER; note = 2'-O-methyl ribonucleotide
  modified_base 38: mod_base = OTHER; note = 2'-O-methyl ribonucleotide
  modified_base 39: mod_base = OTHER; note = 2'-O-methyl ribonucleotide
  modified_base 40: mod_base = OTHER; note = 2'-O-methyl ribonucleotide
  modified_base 41: mod_base = OTHER; note = 2'-O-methyl ribonucleotide
  modified_base 42: mod_base = OTHER; note = 2'-O-methyl ribonucleotide
  modified_base 46: mod_base = OTHER; note = 2'-O-methyl ribonucleotide
  modified_base 48: mod_base = OTHER; note = 2'-O-methyl ribonucleotide
  modified_base 50: mod_base = OTHER; note = 2'-O-methyl ribonucleotide
  modified_base 52: mod_base = OTHER; note = 2'-O-methyl ribonucleotide
  modified_base 53: mod_base = OTHER; note = 2'-O-methyl ribonucleotide
  modified_base 54: mod_base = OTHER; note = 2'-O-methyl ribonucleotide
  modified_base 57: mod_base = OTHER; note = 2'-O-methyl ribonucleotide
  modified_base 61: mod_base = OTHER; note = 2'-O-methyl ribonucleotide
  modified_base 66: mod_base = OTHER; note = 2'-O-methyl ribonucleotide
  modified_base 67: mod_base = OTHER; note = 2'-O-methyl ribonucleotide
  modified_base 70: mod_base = OTHER; note = 2'-O-methyl ribonucleotide
  modified_base 71: mod_base = OTHER; note = 2'-O-methyl ribonucleotide
  modified_base 72: mod_base = OTHER; note = 2'-O-methyl ribonucleotide
  modified_base 73: mod_base = OTHER; note = 2'-O-methyl ribonucleotide
  modified_base 74: mod_base = OTHER; note = 2'-O-methyl ribonucleotide
  modified_base 75: mod_base = OTHER; note = 2'-O-methyl ribonucleotide
  modified_base 76: mod_base = OTHER; note = 2'-O-methyl ribonucleotide
  modified_base 77: mod_base = OTHER; note = 2'-O-methyl ribonucleotide
  modified_base 78: mod_base = OTHER; note = 2'-O-methyl ribonucleotide
  modified_base 79: mod_base = OTHER; note = 2'-O-methyl ribonucleotide
  modified_base 80: mod_base = OTHER; note = 2'-O-methyl ribonucleotide
  modified_base 82: mod_base = OTHER; note = 2'-O-methyl ribonucleotide
  modified_base 83: mod_base = OTHER; note = 2'-O-methyl ribonucleotide
  modified_base 84: mod_base = OTHER; note = 2'-O-methyl ribonucleotide
  modified_base 85: mod_base = OTHER; note = 2'-O-methyl ribonucleotide
  modified_base 86: mod_base = OTHER; note = 2'-O-methyl ribonucleotide
  modified_base 87: mod_base = OTHER; note = 2'-O-methyl ribonucleotide
  modified_base 89: mod_base = OTHER; note = 2'-O-methyl ribonucleotide
  modified_base 92: mod_base = OTHER; note = 2'-O-methyl ribonucleotide
  modified_base 93: mod_base = OTHER; note = 2'-O-methyl ribonucleotide
  modified_base 94: mod_base = OTHER; note = 2'-O-methyl ribonucleotide
  modified_base 95: mod_base = OTHER; note = 2'-O-methyl ribonucleotide
  modified_base 96: mod_base = OTHER; note = 2'-O-methyl ribonucleotide
  modified_base 97: mod_base = OTHER; note = 2'-O-methyl ribonucleotide
  modified_base 98: mod_base = OTHER; note = 2'-O-methyl ribonucleotide
  modified_base 99: mod_base = OTHER; note = 2'-O-methyl ribonucleotide
  modified_base 100: mod_base = OTHER; note = 2'-O-methyl ribonucleotide
  modified_base 101: mod_base = OTHER; note = uniform ribonucleotides (A, C, G, inosine or U), deoxynucleotides (A, G, C, inosine or T), ribonebularine, 2'-O-methylnebularine or deoxynebularine
  modified_base 102: mod_base = OTHER; note = uniform ribonucleotides (A, C, G, inosine or U), deoxynucleotides (A, G, C, inosine or T), ribonebularine, 2'-O-methylnebularine or deoxynebularine
  modified_base 103: mod_base = OTHER; note = uniform ribonucleotides (A, C, G, inosine or U), deoxynucleotides (A, G, C, inosine or T), ribonebularine, 2'-O-methylnebularine or deoxynebularine
  modified_base 1..4: mod_base = OTHER; note = phosphorothioate linkage
  modified_base 64..65: mod_base = OTHER; note = phosphorothioate linkage
  modified_base 98..100: mod_base = OTHER; note = phosphorothioate linkage
  misc_feature 1..100: note = RNA
  misc_feature 101..103: note = Optionally DNA or RNA

SEQ ID NO: 2997 - DNA, 103 bp, synthetic construct; identical to SEQ ID NO: 1797
  source 1..103: mol_type = other DNA
  modified_base 1: mod_base = OTHER; note = 2'-O-methyl ribonucleotide
  modified_base 2: mod_base = OTHER; note = 2'-O-methyl ribonucleotide
  modified_base 3: mod_base = OTHER; note = 2'-O-methyl ribonucleotide
  modified_base 21: mod_base = OTHER; note = 2'-O-methyl ribonucleotide
  modified_base 28: mod_base = OTHER; note = 2'-O-methyl ribonucleotide
  modified_base 29: mod_base = OTHER; note = 2'-O-methyl ribonucleotide
  modified_base 30: mod_base = OTHER; note = 2'-O-methyl ribonucleotide
  modified_base 31: mod_base = OTHER; note = 2'-O-methyl ribonucleotide
  modified_base 32: mod_base = OTHER; note = 2'-O-methyl ribonucleotide
  modified_base 34: mod_base = OTHER; note = 2'-O-methyl ribonucleotide
  modified_base 35: mod_base = OTHER; note = 2'-O-methyl ribonucleotide
  modified_base 36: mod_base = OTHER; note = 2'-O-methyl ribonucleotide
  modified_base 37: mod_base = OTHER; note = 2'-O-methyl ribonucleotide
  modified_base 38: mod_base = OTHER; note = 2'-O-methyl ribonucleotide
  modified_base 39: mod_base = OTHER; note = 2'-O-methyl ribonucleotide
  modified_base 40: mod_base = OTHER; note = 2'-O-methyl ribonucleotide
  modified_base 41: mod_base = OTHER; note = 2'-O-methyl ribonucleotide
  modified_base 42: mod_base = OTHER; note = 2'-O-methyl ribonucleotide
  modified_base 46: mod_base = OTHER; note = 2'-O-methyl ribonucleotide
  modified_base 48: mod_base = OTHER; note = 2'-O-methyl ribonucleotide
  modified_base 50: mod_base = OTHER; note = 2'-O-methyl ribonucleotide
  modified_base 52: mod_base = OTHER; note = 2'-O-methyl ribonucleotide
  modified_base 53: mod_base = OTHER; note = 2'-O-methyl ribonucleotide
  modified_base 54: mod_base = OTHER; note = 2'-O-methyl ribonucleotide
  modified_base 57: mod_base = OTHER; note = 2'-O-methyl ribonucleotide
  modified_base 61: mod_base = OTHER; note = 2'-O-methyl ribonucleotide
  modified_base 66: mod_base = OTHER; note = 2'-O-methyl ribonucleotide
  modified_base 67: mod_base = OTHER; note = 2'-O-methyl ribonucleotide
  modified_base 70: mod_base = OTHER; note = 2'-O-methyl ribonucleotide
  modified_base 71: mod_base = OTHER; note = 2'-O-methyl ribonucleotide
  modified_base 72: mod_base = OTHER; note = 2'-O-methyl ribonucleotide
  modified_base 73: mod_base = OTHER; note = 2'-O-methyl ribonucleotide
  modified_base 74: mod_base = OTHER; note = 2'-O-methyl ribonucleotide
  modified_base 75: mod_base = OTHER; note = 2'-O-methyl ribonucleotide
  modified_base 76: mod_base = OTHER; note = 2'-O-methyl ribonucleotide
  modified_base 77: mod_base = OTHER; note = 2'-O-methyl ribonucleotide
  modified_base 78: mod_base = OTHER; note = 2'-O-methyl ribonucleotide
  modified_base 79: mod_base = OTHER; note = 2'-O-methyl ribonucleotide
  modified_base 80: mod_base = OTHER; note = 2'-O-methyl ribonucleotide
  modified_base 82: mod_base = OTHER; note = 2'-O-methyl ribonucleotide
  modified_base 83: mod_base = OTHER; note = 2'-O-methyl ribonucleotide
  modified_base 84: mod_base = OTHER; note = 2'-O-methyl ribonucleotide
  modified_base 85: mod_base = OTHER; note = 2'-O-methyl ribonucleotide
  modified_base 86: mod_base = OTHER; note = 2'-O-methyl ribonucleotide
  modified_base 87: mod_base = OTHER; note = 2'-O-methyl ribonucleotide
  modified_base 89: mod_base = OTHER; note = 2'-O-methyl ribonucleotide
  modified_base 91: mod_base = OTHER; note = 2'-O-methyl ribonucleotide
  modified_base 92: mod_base = OTHER; note = 2'-O-methyl ribonucleotide
  modified_base 93: mod_base = OTHER; note = 2'-O-methyl ribonucleotide
  modified_base 94: mod_base = OTHER; note = 2'-O-methyl ribonucleotide
  modified_base 95: mod_base = OTHER; note = 2'-O-methyl ribonucleotide
  modified_base 96: mod_base = OTHER; note = 2'-O-methyl ribonucleotide
  modified_base 97: mod_base = OTHER; note = 2'-O-methyl ribonucleotide
  modified_base 98: mod_base = OTHER; note = 2'-O-methyl ribonucleotide
  modified_base 99: mod_base = OTHER; note = 2'-O-methyl ribonucleotide
  modified_base 100: mod_base = OTHER; note = 2'-O-methyl ribonucleotide
  modified_base 101: mod_base = OTHER; note = uniform ribonucleotides (A, C, G, inosine or U), deoxynucleotides (A, G, C, inosine or T), ribonebularine, 2'-O-methylnebularine or deoxynebularine
  modified_base 102: mod_base = OTHER; note = uniform ribonucleotides (A, C, G, inosine or U), deoxynucleotides (A, G, C, inosine or T), ribonebularine, 2'-O-methylnebularine or deoxynebularine
  modified_base 103: mod_base = OTHER; note = uniform ribonucleotides (A, C, G, inosine or U), deoxynucleotides (A, G, C, inosine or T), ribonebularine, 2'-O-methylnebularine or deoxynebularine
  modified_base 1..4: mod_base = OTHER; note = phosphorothioate linkage
  modified_base 64..65: mod_base = OTHER; note = phosphorothioate linkage
  modified_base 98..100: mod_base = OTHER; note = phosphorothioate linkage
  misc_feature 1..100: note = RNA
  misc_feature 101..103: note = Optionally DNA or RNA

SEQ ID NO: 2998 - DNA, 103 bp, synthetic construct; identical to SEQ ID NO: 1797
  source 1..103: mol_type = other DNA
  modified_base 1: mod_base = OTHER; note = 2'-O-methyl ribonucleotide
  modified_base 2: mod_base = OTHER; note = 2'-O-methyl ribonucleotide
  modified_base 3: mod_base = OTHER; note = 2'-O-methyl ribonucleotide
  modified_base 21: mod_base = OTHER; note = 2'-O-methyl ribonucleotide
  modified_base 28: mod_base = OTHER; note = 2'-O-methyl ribonucleotide
  modified_base 29: mod_base = OTHER; note = 2'-O-methyl ribonucleotide
  modified_base 30: mod_base = OTHER; note = 2'-O-methyl ribonucleotide
  modified_base 31: mod_base = OTHER; note = 2'-O-methyl ribonucleotide
  modified_base 32: mod_base = OTHER; note = 2'-O-methyl ribonucleotide
  modified_base 34: mod_base = OTHER; note = 2'-O-methyl ribonucleotide
  modified_base 35: mod_base = OTHER; note = 2'-O-methyl ribonucleotide
  modified_base 36: mod_base = OTHER; note = 2'-O-methyl ribonucleotide
  modified_base 37: mod_base = OTHER; note = 2'-O-methyl ribonucleotide
  modified_base 38: mod_base = OTHER; note = 2'-O-methyl ribonucleotide
  modified_base 39: mod_base = OTHER; note = 2'-O-methyl ribonucleotide
  modified_base 40: mod_base = OTHER; note = 2'-O-methyl ribonucleotide
  modified_base 41: mod_base = OTHER; note = 2'-O-methyl ribonucleotide
  modified_base 42: mod_base = OTHER; note = 2'-O-methyl ribonucleotide
  modified_base 46: mod_base = OTHER; note = 2'-O-methyl ribonucleotide
  modified_base 48: mod_base = OTHER; note = 2'-O-methyl ribonucleotide
  modified_base 50: mod_base = OTHER; note = 2'-O-methyl ribonucleotide
  modified_base 52: mod_base = OTHER; note = 2'-O-methyl ribonucleotide
  modified_base 53: mod_base = OTHER; note = 2'-O-methyl ribonucleotide
  modified_base 54: mod_base = OTHER; note = 2'-O-methyl ribonucleotide
  modified_base 55: mod_base = OTHER; note = 2'-O-methyl ribonucleotide
  modified_base 56: mod_base = OTHER; note = 2'-O-methyl ribonucleotide
  modified_base 57: mod_base = OTHER; note = 2'-O-methyl ribonucleotide
  modified_base 60: mod_base = OTHER; note = 2'-O-methyl ribonucleotide
  modified_base 61: mod_base = OTHER; note = 2'-O-methyl ribonucleotide
  modified_base 66: mod_base = OTHER; note = 2'-O-methyl ribonucleotide
  modified_base 67: mod_base = OTHER; note = 2'-O-methyl ribonucleotide
  modified_base 70: mod_base = OTHER; note = 2'-O-methyl ribonucleotide
  modified_base 71: mod_base = OTHER; note = 2'-O-methyl ribonucleotide
  modified_base 72: mod_base = OTHER; note = 2'-O-methyl ribonucleotide
  modified_base 74: mod_base = OTHER; note = 2'-O-methyl ribonucleotide
  modified_base 75: mod_base = OTHER; note = 2'-O-methyl ribonucleotide
  modified_base 76: mod_base = OTHER; note = 2'-O-methyl ribonucleotide
  modified_base 77: mod_base = OTHER; note = 2'-O-methyl ribonucleotide
  modified_base 78: mod_base = OTHER; note = 2'-O-methyl ribonucleotide
  modified_base 79: mod_base = OTHER; note = 2'-O-methyl ribonucleotide
  modified_base 80: mod_base = OTHER; note = 2'-O-methyl ribonucleotide
  modified_base 82: mod_base = OTHER; note = 2'-O-methyl ribonucleotide
  modified_base 83: mod_base = OTHER; note = 2'-O-methyl ribonucleotide
  modified_base 84: mod_base = OTHER; note = 2'-O-methyl ribonucleotide
  modified_base 85: mod_base = OTHER; note = 2'-O-methyl ribonucleotide
  modified_base 86: mod_base = OTHER; note = 2'-O-methyl ribonucleotide
  modified_base 87: mod_base = OTHER; note = 2'-O-methyl ribonucleotide
  modified_base 89: mod_base = OTHER; note = 2'-O-methyl ribonucleotide
  modified_base 92: mod_base = OTHER; note = 2'-O-methyl ribonucleotide
  modified_base 93: mod_base = OTHER; note = 2'-O-methyl ribonucleotide
  modified_base 94: mod_base = OTHER; note = 2'-O-methyl ribonucleotide
  modified_base 95: mod_base = OTHER; note = 2'-O-methyl ribonucleotide
  modified_base 96: mod_base = OTHER; note = 2'-O-methyl ribonucleotide
  modified_base 97: mod_base = OTHER; note = 2'-O-methyl ribonucleotide
  modified_base 98: mod_base = OTHER; note = 2'-O-methyl ribonucleotide
  modified_base 99: mod_base = OTHER; note = 2'-O-methyl ribonucleotide
  modified_base 100: mod_base = OTHER; note = 2'-O-methyl ribonucleotide
  modified_base 101: mod_base = OTHER; note = uniform ribonucleotides (A, C, G, inosine or U), deoxynucleotides (A, G, C, inosine or T), ribonebularine, 2'-O-methylnebularine or deoxynebularine
  modified_base 102: mod_base = OTHER; note = uniform ribonucleotides (A, C, G, inosine or U), deoxynucleotides (A, G, C, inosine or T), ribonebularine, 2'-O-methylnebularine or deoxynebularine
  modified_base 103: mod_base = OTHER; note = uniform ribonucleotides (A, C, G, inosine or U), deoxynucleotides (A, G, C, inosine or T), ribonebularine, 2'-O-methylnebularine or deoxynebularine
  modified_base 1..4: mod_base = OTHER; note = phosphorothioate linkage
  modified_base 64..65: mod_base = OTHER; note = phosphorothioate linkage
  modified_base 98..100: mod_base = OTHER; note = phosphorothioate linkage
  misc_feature 1..100: note = RNA
  misc_feature 101..103: note = Optionally DNA or RNA

SEQ ID NO: 2999 - DNA, 103 bp, synthetic construct; identical to SEQ ID NO: 1795
  source 1..103: mol_type = other DNA
  modified_base 1: mod_base = OTHER; note = 2'-O-methyl ribonucleotide
  modified_base 2: mod_base = OTHER; note = 2'-O-methyl ribonucleotide
  modified_base 3: mod_base = OTHER; note = 2'-O-methyl ribonucleotide
  modified_base 21: mod_base = OTHER; note = 2'-O-methyl ribonucleotide
  modified_base 28: mod_base = OTHER; note = 2'-O-methyl ribonucleotide
  modified_base 29: mod_base = OTHER; note = 2'-O-methyl ribonucleotide
  modified_base 30: mod_base = OTHER; note = 2'-O-methyl ribonucleotide
  modified_base 31: mod_base = OTHER; note = 2'-O-methyl ribonucleotide
  modified_base 32: mod_base = OTHER; note = 2'-O-methyl ribonucleotide
  modified_base 33: mod_base = OTHER; note = 2'-O-methyl ribonucleotide
  modified_base 34: mod_base = OTHER; note = 2'-O-methyl ribonucleotide
  modified_base 35: mod_base = OTHER; note = 2'-O-methyl ribonucleotide
  modified_base 36: mod_base = OTHER; note = 2'-O-methyl ribonucleotide
  modified_base 37: mod_base = OTHER; note = 2'-O-methyl ribonucleotide
  modified_base 38: mod_base = OTHER; note = 2'-O-methyl ribonucleotide
  modified_base 39: mod_base = OTHER; note = 2'-O-methyl ribonucleotide
  modified_base 40: mod_base = OTHER; note = 2'-O-methyl ribonucleotide
  modified_base 41: mod_base = OTHER; note = 2'-O-methyl ribonucleotide
  modified_base 42: mod_base = OTHER; note = 2'-O-methyl ribonucleotide
  modified_base 46: mod_base = OTHER; note = 2'-O-methyl ribonucleotide
  modified_base 48: mod_base = OTHER; note = 2'-O-methyl ribonucleotide
  modified_base 50: mod_base = OTHER; note = 2'-O-methyl ribonucleotide
  modified_base 52: mod_base = OTHER; note = 2'-O-methyl ribonucleotide
  modified_base 53: mod_base = OTHER; note = 2'-O-methyl ribonucleotide
  modified_base 54: mod_base = OTHER; note = 2'-O-methyl ribonucleotide
  modified_base 55: mod_base = OTHER; note = 2'-O-methyl ribonucleotide
  modified_base 56: mod_base = OTHER; note = 2'-O-methyl ribonucleotide
  modified_base 57: mod_base = OTHER; note = 2'-O-methyl ribonucleotide
  modified_base 60: mod_base = OTHER; note = 2'-O-methyl ribonucleotide
  modified_base 61: mod_base = OTHER; note = 2'-O-methyl ribonucleotide
  modified_base 66: mod_base = OTHER; note = 2'-O-methyl ribonucleotide
  modified_base 67: mod_base = OTHER; note = 2'-O-methyl ribonucleotide
  modified_base 70: mod_base = OTHER; note = 2'-O-methyl ribonucleotide
  modified_base 71: mod_base = OTHER; note = 2'-O-methyl ribonucleotide
  modified_base 72: mod_base = OTHER; note = 2'-O-methyl ribonucleotide
  modified_base 73: mod_base = OTHER; note = 2'-O-methyl ribonucleotide
  modified_base 74: mod_base = OTHER; note = 2'-O-methyl ribonucleotide
  modified_base 75: mod_base = OTHER; note = 2'-O-methyl ribonucleotide
  modified_base 76: mod_base = OTHER; note = 2'-O-methyl ribonucleotide
  modified_base 77: mod_base = OTHER; note = 2'-O-methyl ribonucleotide
  modified_base 78: mod_base = OTHER; note = 2'-O-methyl ribonucleotide
  modified_base 79: mod_base = OTHER; note = 2'-O-methyl ribonucleotide
  modified_base 80: mod_base = OTHER; note = 2'-O-methyl ribonucleotide
  modified_base 81: mod_base = OTHER; note = 2'-O-methyl ribonucleotide
  modified_base 83: mod_base = OTHER; note = 2'-O-methyl ribonucleotide
  modified_base 84: mod_base = OTHER; note = 2'-O-methyl ribonucleotide
  modified_base 85: mod_base = OTHER; note = 2'-O-methyl ribonucleotide
  modified_base 86: mod_base = OTHER; note = 2'-O-methyl ribonucleotide
  modified_base 87: mod_base = OTHER; note = 2'-O-methyl ribonucleotide
  modified_base 88: mod_base = OTHER; note = 2'-O-methyl ribonucleotide
  modified_base 89: mod_base = OTHER; note = 2'-O-methyl ribonucleotide
  modified_base 90: mod_base = OTHER; note = 2'-O-methyl ribonucleotide
  modified_base 91: mod_base = OTHER; note = 2'-O-methyl ribonucleotide
  modified_base 92: mod_base = OTHER; note = 2'-O-methyl ribonucleotide
  modified_base 93: mod_base = OTHER; note = 2'-O-methyl ribonucleotide
  modified_base 94: mod_base = OTHER; note = 2'-O-methyl ribonucleotide
  modified_base 95: mod_base = OTHER; note = 2'-O-methyl ribonucleotide
  modified_base 96: mod_base = OTHER; note = 2'-O-methyl ribonucleotide
  modified_base 97: mod_base = OTHER; note = 2'-O-methyl ribonucleotide
  modified_base 98: mod_base = OTHER; note = 2'-O-methyl ribonucleotide
  modified_base 99: mod_base = OTHER; note = 2'-O-methyl ribonucleotide
  modified_base 100: mod_base = OTHER; note = 2'-O-methyl ribonucleotide
  modified_base 101: mod_base = OTHER; note = uniform ribonucleotides (A, C, G, inosine or U), deoxynucleotides (A, G, C, inosine or T), ribonebularine, 2'-O-methylnebularine or deoxynebularine
  modified_base 102: mod_base = OTHER; note = uniform ribonucleotides (A, C, G, inosine or U), deoxynucleotides (A, G, C, inosine or T), ribonebularine, 2'-O-methylnebularine or deoxynebularine
  modified_base 103: mod_base = OTHER; note = uniform ribonucleotides (A, C, G, inosine or U), deoxynucleotides (A, G, C, inosine or T), ribonebularine, 2'-O-methylnebularine or deoxynebularine
  modified_base 1..4: mod_base = OTHER; note = phosphorothioate linkage
  modified_base 45..46: mod_base = OTHER; note = phosphorothioate linkage
  modified_base 98..100: mod_base = OTHER; note = phosphorothioate linkage
  misc_feature 1..100: note = RNA
  misc_feature 101..103: note = Optionally DNA or RNA

SEQ ID NO: 3000 - DNA, 103 bp, synthetic construct; identical to SEQ ID NO: 1795
  source 1..103: mol_type = other DNA
  modified_base 1: mod_base = OTHER; note = 2'-O-methyl ribonucleotide
  modified_base 2: mod_base = OTHER; note = 2'-O-methyl ribonucleotide
  modified_base 3: mod_base = OTHER; note = 2'-O-methyl ribonucleotide
  modified_base 21: mod_base = OTHER; note = 2'-O-methyl ribonucleotide
  modified_base 28: mod_base = OTHER; note = 2'-O-methyl ribonucleotide
  modified_base 29: mod_base = OTHER; note = 2'-O-methyl ribonucleotide
  modified_base 30: mod_base = OTHER; note = 2'-O-methyl ribonucleotide
  modified_base 31: mod_base = OTHER; note = 2'-O-methyl ribonucleotide
  modified_base 32: mod_base = OTHER; note = 2'-O-methyl ribonucleotide
  modified_base 34: mod_base = OTHER; note = 2'-O-methyl ribonucleotide
  modified_base 35: mod_base = OTHER; note = 2'-O-methyl ribonucleotide
  modified_base 36: mod_base = OTHER; note = 2'-O-methyl ribonucleotide
  modified_base 37: mod_base = OTHER; note = 2'-O-methyl ribonucleotide
  modified_base 38: mod_base = OTHER; note = 2'-O-methyl ribonucleotide
  modified_base 39: mod_base = OTHER; note = 2'-O-methyl ribonucleotide
  modified_base 40: mod_base = OTHER; note = 2'-O-methyl ribonucleotide
  modified_base 41: mod_base = OTHER; note = 2'-O-methyl ribonucleotide
  modified_base 42: mod_base = OTHER; note = 2'-O-methyl ribonucleotide
  modified_base 46: mod_base = OTHER; note = 2'-O-methyl ribonucleotide
  modified_base 48: mod_base = OTHER; note = 2'-O-methyl ribonucleotide
  modified_base 50: mod_base = OTHER; note = 2'-O-methyl ribonucleotide
  modified_base 52: mod_base = OTHER; note = 2'-O-methyl ribonucleotide
  modified_base 53: mod_base = OTHER; note = 2'-O-methyl ribonucleotide
  modified_base 54: mod_base = OTHER; note = 2'-O-methyl ribonucleotide
  modified_base 55: mod_base = OTHER; note = 2'-O-methyl ribonucleotide
  modified_base 56: mod_base = OTHER; note = 2'-O-methyl ribonucleotide
  modified_base 57: mod_base = OTHER; note = 2'-O-methyl ribonucleotide
  modified_base 60: mod_base = OTHER; note = 2'-O-methyl ribonucleotide
  modified_base 61: mod_base = OTHER; note = 2'-O-methyl ribonucleotide
  modified_base 66: mod_base = OTHER; note = 2'-O-methyl ribonucleotide
  modified_base 67: mod_base = OTHER; note = 2'-O-methyl ribonucleotide
  modified_base 70: mod_base = OTHER; note = 2'-O-methyl ribonucleotide
  modified_base 71: mod_base = OTHER; note = 2'-O-methyl ribonucleotide
  modified_base 72: mod_base = OTHER; note = 2'-O-methyl ribonucleotide
  modified_base 74: mod_base = OTHER; note = 2'-O-methyl ribonucleotide
  modified_base 75: mod_base = OTHER; note = 2'-O-methyl ribonucleotide
  modified_base 76: mod_base = OTHER; note = 2'-O-methyl ribonucleotide
  modified_base 77: mod_base = OTHER; note = 2'-O-methyl ribonucleotide
  modified_base 78: mod_base = OTHER; note = 2'-O-methyl ribonucleotide
  modified_base 79: mod_base = OTHER; note = 2'-O-methyl ribonucleotide
  modified_base 80: mod_base = OTHER; note = 2'-O-methyl ribonucleotide
  modified_base 81: mod_base = OTHER; note = 2'-O-methyl ribonucleotide
  modified_base 83: mod_base = OTHER; note = 2'-O-methyl ribonucleotide
  modified_base 84: mod_base = OTHER; note = 2'-O-methyl ribonucleotide
  modified_base 85: mod_base = OTHER; note = 2'-O-methyl ribonucleotide
  modified_base 86: mod_base = OTHER; note = 2'-O-methyl ribonucleotide
  modified_base 87: mod_base = OTHER; note = 2'-O-methyl ribonucleotide
  modified_base 88: mod_base = OTHER; note = 2'-O-methyl ribonucleotide
  modified_base 89: mod_base = OTHER; note = 2'-O-methyl ribonucleotide
  modified_base 90: mod_base = OTHER; note = 2'-O-methyl ribonucleotide
  modified_base 91: mod_base = OTHER; note = 2'-O-methyl ribonucleotide
  modified_base 92: mod_base = OTHER; note = 2'-O-methyl ribonucleotide
  modified_base 93: mod_base = OTHER; note = 2'-O-methyl ribonucleotide
  modified_base 94: mod_base = OTHER; note = 2'-O-methyl ribonucleotide
  modified_base 95: mod_base = OTHER; note = 2'-O-methyl ribonucleotide
  modified_base 96: mod_base = OTHER; note = 2'-O-methyl ribonucleotide
  modified_base 97: mod_base = OTHER; note = 2'-O-methyl ribonucleotide
  modified_base 98: mod_base = OTHER; note = 2'-O-methyl ribonucleotide
  modified_base 99: mod_base = OTHER; note = 2'-O-methyl ribonucleotide
  modified_base 100: mod_base = OTHER; note = 2'-O-methyl ribonucleotide
  modified_base 101: mod_base = OTHER; note = uniform ribonucleotides (A, C, G, inosine or U), deoxynucleotides (A, G, C, inosine or T), ribonebularine, 2'-O-methylnebularine or deoxynebularine
  modified_base 102: mod_base = OTHER; note = uniform ribonucleotides (A, C, G, inosine or U), deoxynucleotides (A, G, C, inosine or T), ribonebularine, 2'-O-methylnebularine or deoxynebularine
  modified_base 103: mod_base = OTHER; note = uniform ribonucleotides (A, C, G, inosine or U), deoxynucleotides (A, G, C, inosine or T), ribonebularine, 2'-O-methylnebularine or deoxynebularine
  modified_base 1..4: mod_base = OTHER; note = phosphorothioate linkage
  modified_base 45..46: mod_base = OTHER; note = phosphorothioate linkage
  modified_base 98..100: mod_base = OTHER; note = phosphorothioate linkage
  misc_feature 1..100: note = RNA
  misc_feature 101..103: note = Optionally DNA or RNA

SEQ ID NO: 3001 - DNA, 103 bp, synthetic construct; identical to SEQ ID NO: 1796
  source 1..103: mol_type = other DNA
  modified_base 1: mod_base = OTHER; note = 2'-O-methyl ribonucleotide
  modified_base 2: mod_base = OTHER; note = 2'-O-methyl ribonucleotide
  modified_base 3: mod_base = OTHER; note = 2'-O-methyl ribonucleotide
  modified_base 21: mod_base = OTHER; note = 2'-O-methyl ribonucleotide
  modified_base 28: mod_base = OTHER; note = 2'-O-methyl ribonucleotide
  modified_base 29: mod_base = OTHER; note = 2'-O-methyl ribonucleotide
  modified_base 30: mod_base = OTHER; note = 2'-O-methyl ribonucleotide
  modified_base 31: mod_base = OTHER; note = 2'-O-methyl ribonucleotide
  modified_base 32: mod_base = OTHER; note = 2'-O-methyl ribonucleotide
  modified_base 33: mod_base = OTHER; note = 2'-O-methyl ribonucleotide
  modified_base 34: mod_base = OTHER; note = 2'-O-methyl ribonucleotide
  modified_base 35: mod_base = OTHER; note = 2'-O-methyl ribonucleotide
  modified_base 36: mod_base = OTHER; note = 2'-O-methyl ribonucleotide
  modified_base 37: mod_base = OTHER; note = 2'-O-methyl ribonucleotide
  modified_base 38: mod_base = OTHER; note = 2'-O-methyl ribonucleotide
  modified_base 39: mod_base = OTHER; note = 2'-O-methyl ribonucleotide
  modified_base 40: mod_base = OTHER; note = 2'-O-methyl ribonucleotide
  modified_base 41: mod_base = OTHER; note = 2'-O-methyl ribonucleotide
  modified_base 42: mod_base = OTHER; note = 2'-O-methyl ribonucleotide
  modified_base 46: mod_base = OTHER; note = 2'-O-methyl ribonucleotide
  modified_base 48: mod_base = OTHER; note = 2'-O-methyl ribonucleotide
  modified_base 50: mod_base = OTHER; note = 2'-O-methyl ribonucleotide
  modified_base 52: mod_base = OTHER; note = 2'-O-methyl ribonucleotide
  modified_base 53: mod_base = OTHER; note = 2'-O-methyl ribonucleotide
  modified_base 54: mod_base = OTHER; note = 2'-O-methyl ribonucleotide
  modified_base 55: mod_base = OTHER; note = 2'-O-methyl ribonucleotide
  modified_base 56: mod_base = OTHER; note = 2'-O-methyl ribonucleotide
  modified_base 57: mod_base = OTHER; note = 2'-O-methyl ribonucleotide
  modified_base 60: mod_base = OTHER; note = 2'-O-methyl ribonucleotide
  modified_base 61: mod_base = OTHER; note = 2'-O-methyl ribonucleotide
  modified_base 66: mod_base = OTHER; note = 2'-O-methyl ribonucleotide
  modified_base 67: mod_base = OTHER; note = 2'-O-methyl ribonucleotide
  modified_base 70: mod_base = OTHER; note = 2'-O-methyl ribonucleotide
  modified_base 71: mod_base = OTHER; note = 2'-O-methyl ribonucleotide
  modified_base 72: mod_base = OTHER; note = 2'-O-methyl ribonucleotide
  modified_base 73: mod_base = OTHER; note = 2'-O-methyl ribonucleotide
  modified_base 74: mod_base = OTHER; note = 2'-O-methyl ribonucleotide
  modified_base 75: mod_base = OTHER; note = 2'-O-methyl ribonucleotide
  modified_base 76: mod_base = OTHER; note = 2'-O-methyl ribonucleotide
  modified_base 77: mod_base = OTHER; note = 2'-O-methyl ribonucleotide
  modified_base 78: mod_base = OTHER; note = 2'-O-methyl ribonucleotide
  modified_base 79: mod_base = OTHER; note = 2'-O-methyl ribonucleotide
  modified_base 80: mod_base = OTHER; note = 2'-O-methyl ribonucleotide
  modified_base 81: mod_base = OTHER; note = 2'-O-methyl ribonucleotide
  modified_base 83: mod_base = OTHER; note = 2'-O-methyl ribonucleotide
  modified_base 84: mod_base = OTHER; note = 2'-O-methyl ribonucleotide
  modified_base 85: mod_base = OTHER; note = 2'-O-methyl ribonucleotide
  modified_base 86: mod_base = OTHER; note = 2'-O-methyl ribonucleotide
  modified_base 87: mod_base = OTHER; note = 2'-O-methyl ribonucleotide
  modified_base 88: mod_base = OTHER; note = 2'-O-methyl ribonucleotide
  modified_base 89: mod_base = OTHER; note = 2'-O-methyl ribonucleotide
  modified_base 90: mod_base = OTHER; note = 2'-O-methyl ribonucleotide
  modified_base 91: mod_base = OTHER; note = 2'-O-methyl ribonucleotide
  modified_base 92: mod_base = OTHER; note = 2'-O-methyl ribonucleotide
  modified_base 93: mod_base = OTHER; note = 2'-O-methyl ribonucleotide
  modified_base 94: mod_base = OTHER; note = 2'-O-methyl ribonucleotide
  modified_base 95: mod_base = OTHER; note = 2'-O-methyl ribonucleotide
  modified_base 96: mod_base = OTHER; note = 2'-O-methyl ribonucleotide
  modified_base 97: mod_base = OTHER; note = 2'-O-methyl ribonucleotide
  modified_base 98: mod_base = OTHER; note = 2'-O-methyl ribonucleotide
  modified_base 99: mod_base = OTHER; note = 2'-O-methyl ribonucleotide
  modified_base 100: mod_base = OTHER; note = 2'-O-methyl ribonucleotide
  modified_base 101: mod_base = OTHER; note = uniform ribonucleotides (A, C, G, inosine or U), deoxynucleotides (A, G, C, inosine or T), ribonebularine, 2'-O-methylnebularine or deoxynebularine
  modified_base 102: mod_base = OTHER; note = uniform ribonucleotides (A, C, G, inosine or U), deoxynucleotides (A, G, C, inosine or T), ribonebularine, 2'-O-methylnebularine or deoxynebularine
  modified_base 103: mod_base = OTHER; note = uniform ribonucleotides (A, C, G, inosine or U), deoxynucleotides (A, G, C, inosine or T), ribonebularine, 2'-O-methylnebularine or deoxynebularine
  modified_base 1..4: mod_base = OTHER; note = phosphorothioate linkage
  modified_base 45..46: mod_base = OTHER; note = phosphorothioate linkage
  modified_base 98..100: mod_base = OTHER; note = phosphorothioate linkage
  misc_feature 1..100: note = RNA
  misc_feature 101..103: note = Optionally DNA or RNA

SEQ ID NO: 3002 - DNA, 103 bp, synthetic construct; identical to SEQ ID NO: 1796
  source 1..103: mol_type = other DNA
  modified_base 1: mod_base = OTHER; note = 2'-O-methyl ribonucleotide
  modified_base 2: mod_base = OTHER; note = 2'-O-methyl ribonucleotide
  modified_base 3: mod_base = OTHER; note = 2'-O-methyl ribonucleotide
  modified_base 21: mod_base = OTHER; note = 2'-O-methyl ribonucleotide
  modified_base 28: mod_base = OTHER; note = 2'-O-methyl ribonucleotide
  modified_base 29: mod_base = OTHER; note = 2'-O-methyl ribonucleotide
  modified_base 30: mod_base = OTHER; note = 2'-O-methyl ribonucleotide
  modified_base 31: mod_base = OTHER; note = 2'-O-methyl ribonucleotide
  modified_base 32: mod_base = OTHER; note = 2'-O-methyl ribonucleotide
  modified_base 34: mod_base = OTHER; note = 2'-O-methyl ribonucleotide
  modified_base 35: mod_base = OTHER; note = 2'-O-methyl ribonucleotide
  modified_base 36: mod_base = OTHER; note = 2'-O-methyl ribonucleotide
  modified_base 37: mod_base = OTHER; note = 2'-O-methyl ribonucleotide
  modified_base 38: mod_base = OTHER; note = 2'-O-methyl ribonucleotide
  modified_base 39: mod_base = OTHER; note = 2'-O-methyl ribonucleotide
  modified_base 40: mod_base = OTHER; note = 2'-O-methyl ribonucleotide
  modified_base 41: mod_base = OTHER; note = 2'-O-methyl ribonucleotide
  modified_base 42: mod_base = OTHER; note = 2'-O-methyl ribonucleotide
  modified_base 46: mod_base = OTHER; note = 2'-O-methyl ribonucleotide
  modified_base 48: mod_base = OTHER; note = 2'-O-methyl ribonucleotide
  modified_base 50: mod_base = OTHER; note = 2'-O-methyl ribonucleotide
  modified_base 52: mod_base = OTHER; note = 2'-O-methyl ribonucleotide
  modified_base 53: mod_base = OTHER; note = 2'-O-methyl ribonucleotide
  modified_base 54: mod_base = OTHER; note = 2'-O-methyl ribonucleotide
  modified_base 55: mod_base = OTHER; note = 2'-O-methyl ribonucleotide
  modified_base 56: mod_base = OTHER; note = 2'-O-methyl ribonucleotide
  modified_base 57: mod_base = OTHER; note = 2'-O-methyl ribonucleotide
  modified_base 60: mod_base = OTHER; note = 2'-O-methyl ribonucleotide
  modified_base 61: mod_base = OTHER; note = 2'-O-methyl ribonucleotide
  modified_base 66: mod_base = OTHER; note = 2'-O-methyl ribonucleotide
  modified_base 67: mod_base = OTHER; note = 2'-O-methyl ribonucleotide
  modified_base 70: mod_base = OTHER; note = 2'-O-methyl ribonucleotide
  modified_base 71: mod_base = OTHER; note = 2'-O-methyl ribonucleotide
  modified_base 72: mod_base = OTHER; note = 2'-O-methyl ribonucleotide
  modified_base 74: mod_base = OTHER; note = 2'-O-methyl ribonucleotide
  modified_base 75: mod_base = OTHER; note = 2'-O-methyl ribonucleotide
  modified_base 76: mod_base = OTHER; note = 2'-O-methyl ribonucleotide
  modified_base 77: mod_base = OTHER; note = 2'-O-methyl ribonucleotide
  modified_base 78: mod_base = OTHER; note = 2'-O-methyl ribonucleotide
  modified_base 79: mod_base = OTHER; note = 2'-O-methyl ribonucleotide
  modified_base 80: mod_base = OTHER; note = 2'-O-methyl ribonucleotide
  modified_base 81: mod_base = OTHER; note = 2'-O-methyl ribonucleotide
  modified_base 83: mod_base = OTHER; note = 2'-O-methyl ribonucleotide
  modified_base 84: mod_base = OTHER; note = 2'-O-methyl ribonucleotide
  modified_base 85: mod_base = OTHER; note = 2'-O-methyl ribonucleotide
  modified_base 86: mod_base = OTHER; note = 2'-O-methyl ribonucleotide
  modified_base 87: mod_base = OTHER; note = 2'-O-methyl ribonucleotide
  modified_base 88: mod_base = OTHER; note = 2'-O-methyl ribonucleotide
  modified_base 89: mod_base = OTHER; note = 2'-O-methyl ribonucleotide
  modified_base 90: mod_base = OTHER; note = 2'-O-methyl ribonucleotide
  modified_base 91: mod_base = OTHER; note = 2'-O-methyl ribonucleotide
  modified_base 92: mod_base = OTHER; note = 2'-O-methyl ribonucleotide
  modified_base 93: mod_base = OTHER; note = 2'-O-methyl ribonucleotide
  modified_base 94: mod_base = OTHER; note = 2'-O-methyl ribonucleotide
  modified_base 95: mod_base = OTHER; note = 2'-O-methyl ribonucleotide
  modified_base 96: mod_base = OTHER; note = 2'-O-methyl ribonucleotide
  modified_base 97: mod_base = OTHER; note = 2'-O-methyl ribonucleotide
  modified_base 98: mod_base = OTHER; note = 2'-O-methyl ribonucleotide
  modified_base 99: mod_base = OTHER; note = 2'-O-methyl ribonucleotide
  modified_base 100: mod_base = OTHER; note = 2'-O-methyl ribonucleotide
  modified_base 101: mod_base = OTHER; note = uniform ribonucleotides (A, C, G, inosine or U), deoxynucleotides (A, G, C, inosine or T), ribonebularine, 2'-O-methylnebularine or deoxynebularine
  modified_base 102: mod_base = OTHER; note = uniform ribonucleotides (A, C, G, inosine or U), deoxynucleotides (A, G, C, inosine or T), ribonebularine, 2'-O-methylnebularine or deoxynebularine
  modified_base 103: mod_base = OTHER; note = uniform ribonucleotides (A, C, G, inosine or U), deoxynucleotides (A, G, C, inosine or T), ribonebularine, 2'-O-methylnebularine or deoxynebularine
  modified_base 1..4: mod_base = OTHER; note = phosphorothioate linkage
  modified_base 45..46: mod_base = OTHER; note = phosphorothioate linkage
  modified_base 98..100: mod_base = OTHER; note = phosphorothioate linkage
  misc_feature 1..100: note = RNA
  misc_feature 101..103: note = Optionally DNA or RNA

SEQ ID NO: 3003 - DNA, 103 bp, synthetic construct; identical to SEQ ID NO: 1797
  source 1..103: mol_type = other DNA
  modified_base 1: mod_base = OTHER; note = 2'-O-methyl ribonucleotide
  modified_base 2: mod_base = OTHER; note = 2'-O-methyl ribonucleotide
  modified_base 3: mod_base = OTHER; note = 2'-O-methyl ribonucleotide
  modified_base 21: mod_base = OTHER; note = 2'-O-methyl ribonucleotide
  modified_base 28: mod_base = OTHER; note = 2'-O-methyl ribonucleotide
  modified_base 29: mod_base = OTHER; note = 2'-O-methyl ribonucleotide
  modified_base 30: mod_base = OTHER; note = 2'-O-methyl ribonucleotide
  modified_base 31: mod_base = OTHER; note = 2'-O-methyl ribonucleotide
  modified_base 32: mod_base = OTHER; note = 2'-O-methyl ribonucleotide
  modified_base 33: mod_base = OTHER; note = 2'-O-methyl ribonucleotide
  modified_base 34: mod_base = OTHER; note = 2'-O-methyl ribonucleotide
  modified_base 35: mod_base = OTHER; note = 2'-O-methyl ribonucleotide
  modified_base 36: mod_base = OTHER; note = 2'-O-methyl ribonucleotide
  modified_base 37: mod_base = OTHER; note = 2'-O-methyl ribonucleotide
  modified_base 38: mod_base = OTHER; note = 2'-O-methyl ribonucleotide
  modified_base 39: mod_base = OTHER; note = 2'-O-methyl ribonucleotide
  modified_base 40: mod_base = OTHER; note = 2'-O-methyl ribonucleotide
  modified_base 41: mod_base = OTHER; note = 2'-O-methyl ribonucleotide
  modified_base 42: mod_base = OTHER; note = 2'-O-methyl ribonucleotide
  modified_base 46: mod_base = OTHER; note = 2'-O-methyl ribonucleotide
  modified_base 48: mod_base = OTHER; note = 2'-O-methyl ribonucleotide
  modified_base 50: mod_base = OTHER; note = 2'-O-methyl ribonucleotide
  modified_base 52: mod_base = OTHER; note = 2'-O-methyl ribonucleotide
  modified_base 53: mod_base = OTHER; note = 2'-O-methyl ribonucleotide
  modified_base 54: mod_base = OTHER; note = 2'-O-methyl ribonucleotide
  modified_base 57: mod_base = OTHER; note = 2'-O-methyl ribonucleotide
  modified_base 61: mod_base = OTHER; note = 2'-O-methyl ribonucleotide
  modified_base 66: mod_base = OTHER; note = 2'-O-methyl ribonucleotide
  modified_base 67: mod_base = OTHER; note = 2'-O-methyl ribonucleotide
  modified_base 70: mod_base = OTHER; note = 2'-O-methyl ribonucleotide
  modified_base 71: mod_base = OTHER; note = 2'-O-methyl ribonucleotide
  modified_base 72: mod_base = OTHER; note = 2'-O-methyl ribonucleotide
  modified_base 74: mod_base = OTHER; note = 2'-O-methyl ribonucleotide
  modified_base 75: mod_base = OTHER; note = 2'-O-methyl ribonucleotide
  modified_base 76: mod_base = OTHER; note = 2'-O-methyl ribonucleotide
  modified_base 77: mod_base = OTHER; note = 2'-O-methyl ribonucleotide
  modified_base 78: mod_base = OTHER; note = 2'-O-methyl ribonucleotide
  modified_base 79: mod_base = OTHER; note = 2'-O-methyl ribonucleotide
  modified_base 80: mod_base = OTHER; note = 2'-O-methyl ribonucleotide
  modified_base 82: mod_base = OTHER; note = 2'-O-methyl ribonucleotide
  modified_base 83: mod_base = OTHER; note = 2'-O-methyl ribonucleotide
  modified_base 84: mod_base = OTHER; note = 2'-O-methyl ribonucleotide
  modified_base 85: mod_base = OTHER; note = 2'-O-methyl ribonucleotide
  modified_base 86: mod_base = OTHER; note = 2'-O-methyl ribonucleotide
  modified_base 87: mod_base = OTHER; note = 2'-O-methyl ribonucleotide
  modified_base 89: mod_base = OTHER; note = 2'-O-methyl ribonucleotide
  modified_base 92: mod_base = OTHER; note = 2'-O-methyl ribonucleotide
  modified_base 93: mod_base = OTHER; note = 2'-O-methyl ribonucleotide
  modified_base 94: mod_base = OTHER; note = 2'-O-methyl ribonucleotide
  modified_base 95: mod_base = OTHER; note = 2'-O-methyl ribonucleotide
  modified_base 96: mod_base = OTHER; note = 2'-O-methyl ribonucleotide
  modified_base 97: mod_base = OTHER; note = 2'-O-methyl ribonucleotide
  modified_base 98: mod_base = OTHER; note = 2'-O-methyl ribonucleotide
  modified_base 99: mod_base = OTHER; note = 2'-O-methyl ribonucleotide
  modified_base 100: mod_base = OTHER; note = 2'-O-methyl ribonucleotide
  modified_base 101: mod_base = OTHER; note = uniform ribonucleotides (A, C, G, inosine or U), deoxynucleotides (A, G, C, inosine or T), ribonebularine, 2'-O-methylnebularine or deoxynebularine
  modified_base 102: mod_base = OTHER; note = uniform ribonucleotides (A, C, G, inosine or U), deoxynucleotides (A, G, C, inosine or T), ribonebularine, 2'-O-methylnebularine or deoxynebularine
  modified_base 103: mod_base = OTHER; note = uniform ribonucleotides (A, C, G, inosine or U), deoxynucleotides (A, G, C, inosine or T), ribonebularine, 2'-O-methylnebularine or deoxynebularine
  modified_base 1..4: mod_base = OTHER; note = phosphorothioate linkage
  modified_base 45..46: mod_base = OTHER; note = phosphorothioate linkage
  modified_base 98..100: mod_base = OTHER; note = phosphorothioate linkage
  misc_feature 1..100: note = RNA
  misc_feature 101..103: note = Optionally DNA or RNA

SEQ ID NO: 3004 - DNA, 103 bp, synthetic construct; identical to SEQ ID NO: 1797
  source 1..103: mol_type = other DNA
  modified_base 1: mod_base = OTHER; note = 2'-O-methyl ribonucleotide
  modified_base 2: mod_base = OTHER; note = 2'-O-methyl ribonucleotide
  modified_base 3: mod_base = OTHER; note = 2'-O-methyl ribonucleotide
  modified_base 21: mod_base = OTHER; note = 2'-O-methyl ribonucleotide
  modified_base 28: mod_base = OTHER; note = 2'-O-methyl ribonucleotide
  modified_base 29: mod_base = OTHER; note = 2'-O-methyl ribonucleotide
  modified_base 30: mod_base = OTHER; note = 2'-O-methyl ribonucleotide
  modified_base 31: mod_base = OTHER; note = 2'-O-methyl ribonucleotide
  modified_base 32: mod_base = OTHER; note = 2'-O-methyl ribonucleotide
  modified_base 33: mod_base = OTHER; note = 2'-O-methyl ribonucleotide
  modified_base 34: mod_base = OTHER; note = 2'-O-methyl ribonucleotide
  modified_base 35: mod_base = OTHER; note = 2'-O-methyl ribonucleotide
  modified_base 36: mod_base = OTHER; note = 2'-O-methyl ribonucleotide
  modified_base 37: mod_base = OTHER; note = 2'-O-methyl ribonucleotide
  modified_base 38: mod_base = OTHER; note = 2'-O-methyl ribonucleotide
  modified_base 39: mod_base = OTHER; note = 2'-O-methyl ribonucleotide
  modified_base 40: mod_base = OTHER; note = 2'-O-methyl ribonucleotide
  modified_base 41: mod_base = OTHER; note = 2'-O-methyl ribonucleotide
  modified_base 42: mod_base = OTHER; note = 2'-O-methyl ribonucleotide
  modified_base 46: mod_base = OTHER; note = 2'-O-methyl ribonucleotide
  modified_base 48: mod_base = OTHER; note = 2'-O-methyl ribonucleotide
  modified_base 50: mod_base = OTHER; note = 2'-O-methyl ribonucleotide
  modified_base 52: mod_base = OTHER; note = 2'-O-methyl ribonucleotide
  modified_base 53: mod_base = OTHER; note = 2'-O-methyl ribonucleotide
  modified_base 54: mod_base = OTHER; note = 2'-O-methyl ribonucleotide
  modified_base 55: mod_base = OTHER; note = 2'-O-methyl ribonucleotide
  modified_base 56: mod_base = OTHER; note = 2'-O-methyl ribonucleotide
  modified_base 57: mod_base = OTHER; note = 2'-O-methyl ribonucleotide
  modified_base 60: mod_base = OTHER; note = 2'-O-methyl ribonucleotide
  modified_base 61: mod_base = OTHER; note = 2'-O-methyl ribonucleotide
  modified_base 66: mod_base = OTHER; note = 2'-O-methyl ribonucleotide
  modified_base 67: mod_base = OTHER; note = 2'-O-methyl ribonucleotide
  modified_base 70: mod_base = OTHER; note = 2'-O-methyl ribonucleotide
  modified_base 71: mod_base = OTHER; note = 2'-O-methyl ribonucleotide
  modified_base 72: mod_base = OTHER; note = 2'-O-methyl ribonucleotide
  modified_base 74: mod_base = OTHER; note = 2'-O-methyl ribonucleotide
  modified_base 75: mod_base = OTHER; note = 2'-O-methyl ribonucleotide
  modified_base 76: mod_base = OTHER; note = 2'-O-methyl ribonucleotide
  modified_base 77: mod_base = OTHER; note = 2'-O-methyl ribonucleotide
  modified_base 78: mod_base = OTHER; note = 2'-O-methyl ribonucleotide
  modified_base 79: mod_base = OTHER; note = 2'-O-methyl ribonucleotide
  modified_base 80: mod_base = OTHER; note = 2'-O-methyl ribonucleotide
  modified_base 82: mod_base = OTHER; note = 2'-O-methyl ribonucleotide
  modified_base 83: mod_base = OTHER; note = 2'-O-methyl ribonucleotide
  modified_base 84: mod_base = OTHER; note = 2'-O-methyl ribonucleotide
  modified_base 85: mod_base = OTHER; note = 2'-O-methyl ribonucleotide
  modified_base 86: mod_base = OTHER; note = 2'-O-methyl ribonucleotide
  modified_base 87: mod_base = OTHER; note = 2'-O-methyl ribonucleotide
  modified_base 89: mod_base = OTHER; note = 2'-O-methyl ribonucleotide
  modified_base 92: mod_base = OTHER; note = 2'-O-methyl ribonucleotide
  modified_base 93: mod_base = OTHER; note = 2'-O-methyl ribonucleotide
  modified_base 94: mod_base = OTHER; note = 2'-O-methyl ribonucleotide
  modified_base 95: mod_base = OTHER; note = 2'-O-methyl ribonucleotide
  modified_base 96: mod_base = OTHER; note = 2'-O-methyl ribonucleotide
  modified_base 97: mod_base = OTHER; note = 2'-O-methyl ribonucleotide
  modified_base 98: mod_base = OTHER; note = 2'-O-methyl ribonucleotide
  modified_base 99: mod_base = OTHER; note = 2'-O-methyl ribonucleotide
  modified_base 100: mod_base = OTHER; note = 2'-O-methyl ribonucleotide
  modified_base 101: mod_base = OTHER; note = uniform ribonucleotides (A, C, G, inosine or U), deoxynucleotides (A, G, C, inosine or T), ribonebularine, 2'-O-methylnebularine or deoxynebularine
  modified_base 102: mod_base = OTHER; note = uniform ribonucleotides (A, C, G, inosine or U), deoxynucleotides (A, G, C, inosine or T), ribonebularine, 2'-O-methylnebularine or deoxynebularine
  modified_base 103: mod_base = OTHER; note = uniform ribonucleotides (A, C, G, inosine or U), deoxynucleotides (A, G, C, inosine or T), ribonebularine, 2'-O-methylnebularine or deoxynebularine
  modified_base 1..4: mod_base = OTHER; note = phosphorothioate linkage
  modified_base 45..46: mod_base = OTHER; note = phosphorothioate linkage
  modified_base 98..100: mod_base = OTHER; note = phosphorothioate linkage
  misc_feature 1..100: note = RNA
  misc_feature 101..103: note = Optionally DNA or RNA

SEQ ID NO: 3005 - DNA, 103 bp, synthetic construct; identical to SEQ ID NO: 1797
  source 1..103: mol_type = other DNA
  modified_base 1: mod_base = OTHER; note = 2'-O-methyl ribonucleotide
  modified_base 2: mod_base = OTHER; note = 2'-O-methyl ribonucleotide
  modified_base 3: mod_base = OTHER; note = 2'-O-methyl ribonucleotide
  modified_base 21: mod_base = OTHER; note = 2'-O-methyl ribonucleotide
  modified_base 28: mod_base = OTHER; note = 2'-O-methyl ribonucleotide
  modified_base 29: mod_base = OTHER; note = 2'-O-methyl ribonucleotide
  modified_base 30: mod_base = OTHER; note = 2'-O-methyl ribonucleotide
  modified_base 31: mod_base = OTHER; note = 2'-O-methyl ribonucleotide
  modified_base 32: mod_base = OTHER; note = 2'-O-methyl ribonucleotide
  modified_base 33: mod_base = OTHER; note = 2'-O-methyl ribonucleotide
  modified_base 34: mod_base = OTHER; note = 2'-O-methyl ribonucleotide
  modified_base 35: mod_base = OTHER; note = 2'-O-methyl ribonucleotide
  modified_base 36: mod_base = OTHER; note = 2'-O-methyl ribonucleotide
  modified_base 37: mod_base = OTHER; note = 2'-O-methyl ribonucleotide
  modified_base 38: mod_base = OTHER; note = 2'-O-methyl ribonucleotide
  modified_base 39: mod_base = OTHER; note = 2'-O-methyl ribonucleotide
  modified_base 40: mod_base = OTHER; note = 2'-O-methyl ribonucleotide
  modified_base 41: mod_base = OTHER; note = 2'-O-methyl ribonucleotide
  modified_base 42: mod_base = OTHER; note = 2'-O-methyl ribonucleotide
  modified_base 46: mod_base = OTHER; note = 2'-O-methyl ribonucleotide
  modified_base 48: mod_base = OTHER; note = 2'-O-methyl ribonucleotide
  modified_base 50: mod_base = OTHER; note = 2'-O-methyl ribonucleotide
  modified_base 52: mod_base = OTHER; note = 2'-O-methyl ribonucleotide
  modified_base 53: mod_base = OTHER; note = 2'-O-methyl ribonucleotide
  modified_base 54: mod_base = OTHER; note = 2'-O-methyl ribonucleotide
  modified_base 57: mod_base = OTHER; note = 2'-O-methyl ribonucleotide
  modified_base 61: mod_base = OTHER; note = 2'-O-methyl ribonucleotide
  modified_base 66: mod_base = OTHER; note = 2'-O-methyl ribonucleotide
  modified_base 67: mod_base = OTHER; note = 2'-O-methyl ribonucleotide
  modified_base 70: mod_base = OTHER; note = 2'-O-methyl ribonucleotide
  modified_base 71: mod_base = OTHER; note = 2'-O-methyl ribonucleotide
  modified_base 72: mod_base = OTHER; note = 2'-O-methyl ribonucleotide
  modified_base 73: mod_base = OTHER; note = 2'-O-methyl ribonucleotide
  modified_base 74: mod_base = OTHER; note = 2'-O-methyl ribonucleotide
  modified_base 75: mod_base = OTHER; note = 2'-O-methyl ribonucleotide
  modified_base 76: mod_base = OTHER; note = 2'-O-methyl ribonucleotide
  modified_base 77: mod_base = OTHER; note = 2'-O-methyl ribonucleotide
  modified_base 78: mod_base = OTHER; note = 2'-O-methyl ribonucleotide
  modified_base 79: mod_base = OTHER; note = 2'-O-methyl ribonucleotide
  modified_base 80: mod_base = OTHER; note = 2'-O-methyl ribonucleotide
  modified_base 82: mod_base = OTHER; note = 2'-O-methyl ribonucleotide
  modified_base 83: mod_base = OTHER; note = 2'-O-methyl ribonucleotide
  modified_base 84: mod_base = OTHER; note = 2'-O-methyl ribonucleotide
  modified_base 85: mod_base = OTHER; note = 2'-O-methyl ribonucleotide
  modified_base 86: mod_base = OTHER; note = 2'-O-methyl ribonucleotide
  modified_base 87: mod_base = OTHER; note = 2'-O-methyl ribonucleotide
  modified_base 89: mod_base = OTHER; note = 2'-O-methyl ribonucleotide
  modified_base 91: mod_base = OTHER; note = 2'-O-methyl ribonucleotide
  modified_base 92: mod_base = OTHER; note = 2'-O-methyl ribonucleotide
  modified_base 93: mod_base = OTHER; note = 2'-O-methyl ribonucleotide
  modified_base 94: mod_base = OTHER; note = 2'-O-methyl ribonucleotide
  modified_base 95: mod_base = OTHER; note = 2'-O-methyl ribonucleotide
  modified_base 96: mod_base = OTHER; note = 2'-O-methyl ribonucleotide
  modified_base 97: mod_base = OTHER; note = 2'-O-methyl ribonucleotide
  modified_base 98: mod_base = OTHER; note = 2'-O-methyl ribonucleotide
  modified_base 99: mod_base = OTHER; note = 2'-O-methyl ribonucleotide
  modified_base 100: mod_base = OTHER; note = 2'-O-methyl ribonucleotide
  modified_base 101: mod_base = OTHER; note = uniform ribonucleotides (A, C, G, inosine or U), deoxynucleotides (A, G, C, inosine or T), ribonebularine, 2'-O-methylnebularine or deoxynebularine
  modified_base 102: mod_base = OTHER; note = uniform ribonucleotides (A, C, G, inosine or U), deoxynucleotides (A, G, C, inosine or T), ribonebularine, 2'-O-methylnebularine or deoxynebularine
  modified_base 103: mod_base = OTHER; note = uniform ribonucleotides (A, C, G, inosine or U), deoxynucleotides (A, G, C, inosine or T), ribonebularine, 2'-O-methylnebularine or deoxynebularine
  modified_base 1..4: mod_base = OTHER; note = phosphorothioate linkage
  modified_base 45..46: mod_base = OTHER; note = phosphorothioate linkage
  modified_base 98..100: mod_base = OTHER; note = phosphorothioate linkage
  misc_feature 1..100: note = RNA
  misc_feature 101..103: note = Optionally DNA or RNA

SEQ ID NO: 3006 - DNA, 103 bp, synthetic construct; identical to SEQ ID NO: 1797
  source 1..103: mol_type = other DNA
  modified_base 1: mod_base = OTHER; note = 2'-O-methyl ribonucleotide
  modified_base 2: mod_base = OTHER; note = 2'-O-methyl ribonucleotide
  modified_base 3: mod_base = OTHER; note = 2'-O-methyl ribonucleotide
  modified_base 21: mod_base = OTHER; note = 2'-O-methyl ribonucleotide
  modified_base 28: mod_base = OTHER; note = 2'-O-methyl ribonucleotide
  modified_base 29: mod_base = OTHER; note = 2'-O-methyl ribonucleotide
  modified_base 30: mod_base = OTHER; note = 2'-O-methyl ribonucleotide
  modified_base 31: mod_base = OTHER; note = 2'-O-methyl ribonucleotide
  modified_base 32: mod_base = OTHER; note = 2'-O-methyl ribonucleotide
  modified_base 34: mod_base = OTHER; note = 2'-O-methyl ribonucleotide
  modified_base 35: mod_base = OTHER; note = 2'-O-methyl ribonucleotide
  modified_base 36: mod_base = OTHER; note = 2'-O-methyl ribonucleotide
  modified_base 37: mod_base = OTHER; note = 2'-O-methyl ribonucleotide
  modified_base 38: mod_base = OTHER; note = 2'-O-methyl ribonucleotide
  modified_base 39: mod_base = OTHER; note = 2'-O-methyl ribonucleotide
  modified_base 40: mod_base = OTHER; note = 2'-O-methyl ribonucleotide
  modified_base 41: mod_base = OTHER; note = 2'-O-methyl ribonucleotide
  modified_base 42: mod_base = OTHER; note = 2'-O-methyl ribonucleotide
  modified_base 46: mod_base = OTHER; note = 2'-O-methyl ribonucleotide
  modified_base 48: mod_base = OTHER; note = 2'-O-methyl ribonucleotide
  modified_base 50: mod_base = OTHER; note = 2'-O-methyl ribonucleotide
  modified_base 52: mod_base = OTHER; note = 2'-O-methyl ribonucleotide
  modified_base 53: mod_base = OTHER; note = 2'-O-methyl ribonucleotide
  modified_base 54: mod_base = OTHER; note = 2'-O-methyl ribonucleotide
  modified_base 57: mod_base = OTHER; note = 2'-O-methyl ribonucleotide
  modified_base 61: mod_base = OTHER; note = 2'-O-methyl ribonucleotide
  modified_base 66: mod_base = OTHER; note = 2'-O-methyl ribonucleotide
  modified_base 67: mod_base = OTHER; note = 2'-O-methyl ribonucleotide
  modified_base 70: mod_base = OTHER; note = 2'-O-methyl ribonucleotide
  modified_base 71: mod_base = OTHER; note = 2'-O-methyl ribonucleotide
  modified_base 72: mod_base = OTHER; note = 2'-O-methyl ribonucleotide
  modified_base 73: mod_base = OTHER; note = 2'-O-methyl ribonucleotide
  modified_base 74: mod_base = OTHER; note = 2'-O-methyl ribonucleotide
  modified_base 75: mod_base = OTHER; note = 2'-O-methyl ribonucleotide
  modified_base 76: mod_base = OTHER; note = 2'-O-methyl ribonucleotide
  modified_base 77: mod_base = OTHER; note = 2'-O-methyl ribonucleotide
  modified_base 78: mod_base = OTHER; note = 2'-O-methyl ribonucleotide
  modified_base 79: mod_base = OTHER; note = 2'-O-methyl ribonucleotide
  modified_base 80: mod_base = OTHER; note = 2'-O-methyl ribonucleotide
  modified_base 82: mod_base = OTHER; note = 2'-O-methyl ribonucleotide
  modified_base 83: mod_base = OTHER; note = 2'-O-methyl ribonucleotide
  modified_base 84: mod_base = OTHER; note = 2'-O-methyl ribonucleotide
  modified_base 85: mod_base = OTHER; note = 2'-O-methyl ribonucleotide
  modified_base 86: mod_base = OTHER; note = 2'-O-methyl ribonucleotide
  modified_base 87: mod_base = OTHER; note = 2'-O-methyl ribonucleotide
  modified_base 89: mod_base = OTHER; note = 2'-O-methyl ribonucleotide
  modified_base 92: mod_base = OTHER; note = 2'-O-methyl ribonucleotide
  modified_base 93: mod_base = OTHER; note = 2'-O-methyl ribonucleotide
  modified_base 94: mod_base = OTHER; note = 2'-O-methyl ribonucleotide
  modified_base 95: mod_base = OTHER; note = 2'-O-methyl ribonucleotide
  modified_base 96: mod_base = OTHER; note = 2'-O-methyl ribonucleotide
  modified_base 97: mod_base = OTHER; note = 2'-O-methyl ribonucleotide
  modified_base 98: mod_base = OTHER; note = 2'-O-methyl ribonucleotide
  modified_base 99: mod_base = OTHER; note = 2'-O-methyl ribonucleotide
  modified_base 100: mod_base = OTHER; note = 2'-O-methyl ribonucleotide
  modified_base 101: mod_base = OTHER; note = uniform ribonucleotides (A, C, G, inosine or U), deoxynucleotides (A, G, C, inosine or T), ribonebularine, 2'-O-methylnebularine or deoxynebularine
  modified_base 102: mod_base = OTHER; note = uniform ribonucleotides (A, C, G, inosine or U), deoxynucleotides (A, G, C, inosine or T), ribonebularine, 2'-O-methylnebularine or deoxynebularine
  modified_base 103: mod_base = OTHER; note = uniform ribonucleotides (A, C, G, inosine or U), deoxynucleotides (A, G, C, inosine or T), ribonebularine, 2'-O-methylnebularine or deoxynebularine
  modified_base 1..4: mod_base = OTHER; note = phosphorothioate linkage
  modified_base 45..46: mod_base = OTHER; note = phosphorothioate linkage
  modified_base 98..100: mod_base = OTHER; note = phosphorothioate linkage
  misc_feature 1..100: note = RNA
  misc_feature 101..103: note = Optionally DNA or RNA

SEQ ID NO: 3007 - DNA, 103 bp, synthetic construct; identical to SEQ ID NO: 1797
  source 1..103: mol_type = other DNA
  modified_base 1: mod_base = OTHER; note = 2'-O-methyl ribonucleotide
  modified_base 2: mod_base = OTHER; note = 2'-O-methyl ribonucleotide
  modified_base 3: mod_base = OTHER; note = 2'-O-methyl ribonucleotide
  modified_base 21: mod_base = OTHER; note = 2'-O-methyl ribonucleotide
  modified_base 28: mod_base = OTHER; note = 2'-O-methyl ribonucleotide
  modified_base 29: mod_base = OTHER; note = 2'-O-methyl ribonucleotide
  modified_base 30: mod_base = OTHER; note = 2'-O-methyl ribonucleotide
  modified_base 31: mod_base = OTHER; note = 2'-O-methyl ribonucleotide
  modified_base 32: mod_base = OTHER; note = 2'-O-methyl ribonucleotide
  modified_base 34: mod_base = OTHER; note = 2'-O-methyl ribonucleotide
  modified_base 35: mod_base = OTHER; note = 2'-O-methyl ribonucleotide
  modified_base 36: mod_base = OTHER; note = 2'-O-methyl ribonucleotide
  modified_base 37: mod_base = OTHER; note = 2'-O-methyl ribonucleotide
  modified_base 38: mod_base = OTHER; note = 2'-O-methyl ribonucleotide
  modified_base 39: mod_base = OTHER; note = 2'-O-methyl ribonucleotide
  modified_base 40: mod_base = OTHER; note = 2'-O-methyl ribonucleotide
  modified_base 41: mod_base = OTHER; note = 2'-O-methyl ribonucleotide
  modified_base 42: mod_base = OTHER; note = 2'-O-methyl ribonucleotide
  modified_base 46: mod_base = OTHER; note = 2'-O-methyl ribonucleotide
  modified_base 48: mod_base = OTHER; note = 2'-O-methyl ribonucleotide
  modified_base 50: mod_base = OTHER; note = 2'-O-methyl ribonucleotide
  modified_base 52: mod_base = OTHER; note = 2'-O-methyl ribonucleotide
  modified_base 53: mod_base = OTHER; note = 2'-O-methyl ribonucleotide
  modified_base 54: mod_base = OTHER; note = 2'-O-methyl ribonucleotide
  modified_base 57: mod_base = OTHER; note = 2'-O-methyl ribonucleotide
  modified_base 61: mod_base = OTHER; note = 2'-O-methyl ribonucleotide
  modified_base 66: mod_base = OTHER; note = 2'-O-methyl ribonucleotide
  modified_base 67: mod_base = OTHER; note = 2'-O-methyl ribonucleotide
  modified_base 70: mod_base = OTHER; note = 2'-O-methyl ribonucleotide
  modified_base 71: mod_base = OTHER; note = 2'-O-methyl ribonucleotide
  modified_base 72: mod_base = OTHER; note = 2'-O-methyl ribonucleotide
  modified_base 73: mod_base = OTHER; note = 2'-O-methyl ribonucleotide
  modified_base 74: mod_base = OTHER; note = 2'-O-methyl ribonucleotide
  modified_base 75: mod_base = OTHER; note = 2'-O-methyl ribonucleotide
  modified_base 76: mod_base = OTHER; note = 2'-O-methyl ribonucleotide
  modified_base 77: mod_base = OTHER; note = 2'-O-methyl ribonucleotide
  modified_base 78: mod_base = OTHER; note = 2'-O-methyl ribonucleotide
  modified_base 79: mod_base = OTHER; note = 2'-O-methyl ribonucleotide
  modified_base 80: mod_base = OTHER; note = 2'-O-methyl ribonucleotide
  modified_base 82: mod_base = OTHER; note = 2'-O-methyl ribonucleotide
  modified_base 83: mod_base = OTHER; note = 2'-O-methyl ribonucleotide
  modified_base 84: mod_base = OTHER; note = 2'-O-methyl ribonucleotide
  modified_base 85: mod_base = OTHER; note = 2'-O-methyl ribonucleotide
  modified_base 86: mod_base = OTHER; note = 2'-O-methyl ribonucleotide
  modified_base 87: mod_base = OTHER; note = 2'-O-methyl ribonucleotide
  modified_base 89: mod_base = OTHER; note = 2'-O-methyl ribonucleotide
  modified_base 91: mod_base = OTHER; note = 2'-O-methyl ribonucleotide
  modified_base 92: mod_base = OTHER; note = 2'-O-methyl ribonucleotide
  modified_base 93: mod_base = OTHER; note = 2'-O-methyl ribonucleotide
  modified_base 94: mod_base = OTHER; note = 2'-O-methyl ribonucleotide
  modified_base 95: mod_base = OTHER; note = 2'-O-methyl ribonucleotide
  modified_base 96: mod_base = OTHER; note = 2'-O-methyl ribonucleotide
  modified_base 97: mod_base = OTHER; note = 2'-O-methyl ribonucleotide
  modified_base 98: mod_base = OTHER; note = 2'-O-methyl ribonucleotide
  modified_base 99: mod_base = OTHER; note = 2'-O-methyl ribonucleotide
  modified_base 100: mod_base = OTHER; note = 2'-O-methyl ribonucleotide
  modified_base 101: mod_base = OTHER; note = uniform ribonucleotides (A, C, G, inosine or U), deoxynucleotides (A, G, C, inosine or T), ribonebularine, 2'-O-methylnebularine or deoxynebularine
  modified_base 102: mod_base = OTHER; note = uniform ribonucleotides (A, C, G, inosine or U), deoxynucleotides (A, G, C, inosine or T), ribonebularine, 2'-O-methylnebularine or deoxynebularine
  modified_base 103: mod_base = OTHER; note = uniform ribonucleotides (A, C, G, inosine or U), deoxynucleotides (A, G, C, inosine or T), ribonebularine, 2'-O-methylnebularine or deoxynebularine
  modified_base 1..4: mod_base = OTHER; note = phosphorothioate linkage
  modified_base 45..46: mod_base = OTHER; note = phosphorothioate linkage
  modified_base 98..100: mod_base = OTHER; note = phosphorothioate linkage
  misc_feature 1..100: note = RNA
  misc_feature 101..103: note = Optionally DNA or RNA

SEQ ID NO: 3008 - DNA, 103 bp, synthetic construct; identical to SEQ ID NO: 1797
  source 1..103: mol_type = other DNA
  modified_base 1: mod_base = OTHER; note = 2'-O-methyl ribonucleotide
  modified_base 2: mod_base = OTHER; note = 2'-O-methyl ribonucleotide
  modified_base 3: mod_base = OTHER; note = 2'-O-methyl ribonucleotide
  modified_base 21: mod_base = OTHER; note = 2'-O-methyl ribonucleotide
  modified_base 28: mod_base = OTHER; note = 2'-O-methyl ribonucleotide
  modified_base 29: mod_base = OTHER; note = 2'-O-methyl ribonucleotide
  modified_base 30: mod_base = OTHER; note = 2'-O-methyl ribonucleotide
  modified_base 31: mod_base = OTHER; note = 2'-O-methyl ribonucleotide
  modified_base 32: mod_base = OTHER; note = 2'-O-methyl ribonucleotide
  modified_base 34: mod_base = OTHER; note = 2'-O-methyl ribonucleotide
  modified_base 35: mod_base = OTHER; note = 2'-O-methyl ribonucleotide
  modified_base 36: mod_base = OTHER; note = 2'-O-methyl ribonucleotide
  modified_base 37: mod_base = OTHER; note = 2'-O-methyl ribonucleotide
  modified_base 38: mod_base = OTHER; note = 2'-O-methyl ribonucleotide
  modified_base 39: mod_base = OTHER; note = 2'-O-methyl ribonucleotide
  modified_base 40: mod_base = OTHER; note = 2'-O-methyl ribonucleotide
  modified_base 41: mod_base = OTHER; note = 2'-O-methyl ribonucleotide
  modified_base 42: mod_base = OTHER; note = 2'-O-methyl ribonucleotide
  modified_base 46: mod_base = OTHER; note = 2'-O-methyl ribonucleotide
  modified_base 48: mod_base = OTHER; note = 2'-O-methyl ribonucleotide
  modified_base 50: mod_base = OTHER; note = 2'-O-methyl ribonucleotide
  modified_base 52: mod_base = OTHER; note = 2'-O-methyl ribonucleotide
  modified_base 53: mod_base = OTHER; note = 2'-O-methyl ribonucleotide
  modified_base 54: mod_base = OTHER; note = 2'-O-methyl ribonucleotide
  modified_base 55: mod_base = OTHER; note = 2'-O-methyl ribonucleotide
  modified_base 56: mod_base = OTHER; note = 2'-O-methyl ribonucleotide
  modified_base 57: mod_base = OTHER; note = 2'-O-methyl ribonucleotide
  modified_base 60: mod_base = OTHER; note = 2'-O-methyl ribonucleotide
  modified_base 61: mod_base = OTHER; note = 2'-O-methyl ribonucleotide
  modified_base 66: mod_base = OTHER; note = 2'-O-methyl ribonucleotide
  modified_base 67: mod_base = OTHER; note = 2'-O-methyl ribonucleotide
  modified_base 70: mod_base = OTHER; note = 2'-O-methyl ribonucleotide
  modified_base 71: mod_base = OTHER; note = 2'-O-methyl ribonucleotide
  modified_base 72: mod_base = OTHER; note = 2'-O-methyl ribonucleotide
  modified_base 74: mod_base = OTHER; note = 2'-O-methyl ribonucleotide
  modified_base 75: mod_base = OTHER; note = 2'-O-methyl ribonucleotide
  modified_base 76: mod_base = OTHER; note = 2'-O-methyl ribonucleotide
  modified_base 77: mod_base = OTHER; note = 2'-O-methyl ribonucleotide
  modified_base 78: mod_base = OTHER; note = 2'-O-methyl ribonucleotide
  modified_base 79: mod_base = OTHER; note = 2'-O-methyl ribonucleotide
  modified_base 80: mod_base = OTHER; note = 2'-O-methyl ribonucleotide
  modified_base 82: mod_base = OTHER; note = 2'-O-methyl ribonucleotide
  modified_base 83: mod_base = OTHER; note = 2'-O-methyl ribonucleotide
  modified_base 84: mod_base = OTHER; note = 2'-O-methyl ribonucleotide
  modified_base 85: mod_base = OTHER; note = 2'-O-methyl ribonucleotide
  modified_base 86: mod_base = OTHER; note = 2'-O-methyl ribonucleotide
  modified_base 87: mod_base = OTHER; note = 2'-O-methyl ribonucleotide
  modified_base 89: mod_base = OTHER; note = 2'-O-methyl ribonucleotide
  modified_base 92: mod_base = OTHER; note = 2'-O-methyl ribonucleotide
  modified_base 93: mod_base = OTHER; note = 2'-O-methyl ribonucleotide
  modified_base 94: mod_base = OTHER; note = 2'-O-methyl ribonucleotide
  modified_base 95: mod_base = OTHER; note = 2'-O-methyl ribonucleotide
  modified_base 96: mod_base = OTHER; note = 2'-O-methyl ribonucleotide
  modified_base 97: mod_base = OTHER; note = 2'-O-methyl ribonucleotide
  modified_base 98: mod_base = OTHER; note = 2'-O-methyl ribonucleotide
  modified_base 99: mod_base = OTHER; note = 2'-O-methyl ribonucleotide
  modified_base 100: mod_base = OTHER; note = 2'-O-methyl ribonucleotide
  modified_base 101: mod_base = OTHER; note = uniform ribonucleotides (A, C, G, inosine or U), deoxynucleotides (A, G, C, inosine or T), ribonebularine, 2'-O-methylnebularine or deoxynebularine
  modified_base 102: mod_base = OTHER; note = uniform ribonucleotides (A, C, G, inosine or U), deoxynucleotides (A, G, C, inosine or T), ribonebularine, 2'-O-methylnebularine or deoxynebularine
  modified_base 103: mod_base = OTHER; note = uniform ribonucleotides (A, C, G, inosine or U), deoxynucleotides (A, G, C, inosine or T), ribonebularine, 2'-O-methylnebularine or deoxynebularine
  modified_base 1..4: mod_base = OTHER; note = phosphorothioate linkage
  modified_base 45..46: mod_base = OTHER; note = phosphorothioate linkage
  modified_base 98..100: mod_base = OTHER; note = phosphorothioate linkage
  misc_feature 1..100: note = RNA
  misc_feature 101..103: note = Optionally DNA or RNA

SEQ ID NO: 3009 - DNA, 103 bp, synthetic construct; identical to SEQ ID NO: 1795
  source 1..103: mol_type = other DNA
  modified_base 1: mod_base = OTHER; note = 2'-O-methyl ribonucleotide
  modified_base 2: mod_base = OTHER; note = 2'-O-methyl ribonucleotide
  modified_base 3: mod_base = OTHER; note = 2'-O-methyl ribonucleotide
  modified_base 21: mod_base = OTHER; note = 2'-O-methyl ribonucleotide
  modified_base 28: mod_base = OTHER; note = 2'-O-methyl ribonucleotide
  modified_base 29: mod_base = OTHER; note = 2'-O-methyl ribonucleotide
  modified_base 30: mod_base = OTHER; note = 2'-O-methyl ribonucleotide
  modified_base 31: mod_base = OTHER; note = 2'-O-methyl ribonucleotide
  modified_base 32: mod_base = OTHER; note = 2'-O-methyl ribonucleotide
  modified_base 33: mod_base = OTHER; note = 2'-O-methyl ribonucleotide
  modified_base 34: mod_base = OTHER; note = 2'-O-methyl ribonucleotide
  modified_base 35: mod_base = OTHER; note = 2'-O-methyl ribonucleotide
  modified_base 36: mod_base = OTHER; note = 2'-O-methyl ribonucleotide
  modified_base 37: mod_base = OTHER; note = 2'-O-methyl ribonucleotide
  modified_base 38: mod_base = OTHER; note = 2'-O-methyl ribonucleotide
  modified_base 39: mod_base = OTHER; note = 2'-O-methyl ribonucleotide
  modified_base 40: mod_base = OTHER; note = 2'-O-methyl ribonucleotide
  modified_base 41: mod_base = OTHER; note = 2'-O-methyl ribonucleotide
  modified_base 42: mod_base = OTHER; note = 2'-O-methyl ribonucleotide
  modified_base 46: mod_base = OTHER; note = 2'-O-methyl ribonucleotide
  modified_base 48: mod_base = OTHER; note = 2'-O-methyl ribonucleotide
  modified_base 50: mod_base = OTHER; note = 2'-O-methyl ribonucleotide
  modified_base 52: mod_base = OTHER; note = 2'-O-methyl ribonucleotide
  modified_base 53: mod_base = OTHER; note = 2'-O-methyl ribonucleotide
  modified_base 54: mod_base = OTHER; note = 2'-O-methyl ribonucleotide
  modified_base 55: mod_base = OTHER; note = 2'-O-methyl ribonucleotide
  modified_base 56: mod_base = OTHER; note = 2'-O-methyl ribonucleotide
  modified_base 57: mod_base = OTHER; note = 2'-O-methyl ribonucleotide
  modified_base 60: mod_base = OTHER; note = 2'-O-methyl ribonucleotide
  modified_base 61: mod_base = OTHER; note = 2'-O-methyl ribonucleotide
  modified_base 66: mod_base = OTHER; note = 2'-O-methyl ribonucleotide
  modified_base 67: mod_base = OTHER; note = 2'-O-methyl ribonucleotide
  modified_base 70: mod_base = OTHER; note = 2'-O-methyl ribonucleotide
  modified_base 71: mod_base = OTHER; note = 2'-O-methyl ribonucleotide
  modified_base 72: mod_base = OTHER; note = 2'-O-methyl ribonucleotide
  modified_base 73: mod_base = OTHER; note = 2'-O-methyl ribonucleotide
  modified_base 74: mod_base = OTHER; note = 2'-O-methyl ribonucleotide
  modified_base 75: mod_base = OTHER; note = 2'-O-methyl ribonucleotide
  modified_base 76: mod_base = OTHER; note = 2'-O-methyl ribonucleotide
  modified_base 77: mod_base = OTHER; note = 2'-O-methyl ribonucleotide
  modified_base 78: mod_base = OTHER; note = 2'-O-methyl ribonucleotide
  modified_base 79: mod_base = OTHER; note = 2'-O-methyl ribonucleotide
  modified_base 80: mod_base = OTHER; note = 2'-O-methyl ribonucleotide
  modified_base 81: mod_base = OTHER; note = 2'-O-methyl ribonucleotide
  modified_base 83: mod_base = OTHER; note = 2'-O-methyl ribonucleotide
  modified_base 84: mod_base = OTHER; note = 2'-O-methyl ribonucleotide
  modified_base 85: mod_base = OTHER; note = 2'-O-methyl ribonucleotide
  modified_base 86: mod_base = OTHER; note = 2'-O-methyl ribonucleotide
  modified_base 87: mod_base = OTHER; note = 2'-O-methyl ribonucleotide
  modified_base 88: mod_base = OTHER; note = 2'-O-methyl ribonucleotide
  modified_base 89: mod_base = OTHER; note = 2'-O-methyl ribonucleotide
  modified_base 90: mod_base = OTHER; note = 2'-O-methyl ribonucleotide
  modified_base 91: mod_base = OTHER; note = 2'-O-methyl ribonucleotide
  modified_base 92: mod_base = OTHER; note = 2'-O-methyl ribonucleotide
  modified_base 93: mod_base = OTHER; note = 2'-O-methyl ribonucleotide
  modified_base 94: mod_base = OTHER; note = 2'-O-methyl ribonucleotide
  modified_base 95: mod_base = OTHER; note = 2'-O-methyl ribonucleotide
  modified_base 96: mod_base = OTHER; note = 2'-O-methyl ribonucleotide
  modified_base 97: mod_base = OTHER; note = 2'-O-methyl ribonucleotide
  modified_base 98: mod_base = OTHER; note = 2'-O-methyl ribonucleotide
  modified_base 99: mod_base = OTHER; note = 2'-O-methyl ribonucleotide
  modified_base 100: mod_base = OTHER; note = 2'-O-methyl ribonucleotide
  modified_base 101: mod_base = OTHER; note = uniform ribonucleotides (A, C, G, inosine or U), deoxynucleotides (A, G, C, inosine or T), ribonebularine, 2'-O-methylnebularine or deoxynebularine
  modified_base 102: mod_base = OTHER; note = uniform ribonucleotides (A, C, G, inosine or U), deoxynucleotides (A, G, C, inosine or T), ribonebularine, 2'-O-methylnebularine or deoxynebularine
  modified_base 103: mod_base = OTHER; note = uniform ribonucleotides (A, C, G, inosine or U), deoxynucleotides (A, G, C, inosine or T), ribonebularine, 2'-O-methylnebularine or deoxynebularine
  modified_base 1..4: mod_base = OTHER; note = phosphorothioate linkage
  modified_base 25..26: mod_base = OTHER; note = phosphorothioate linkage
  modified_base 98..100: mod_base = OTHER; note = phosphorothioate linkage
  misc_feature 1..100: note = RNA
  misc_feature 101..103: note = Optionally DNA or RNA

SEQ ID NO: 3010 - DNA, 103 bp, synthetic construct; identical to SEQ ID NO: 1795
  source 1..103: mol_type = other DNA
  modified_base 1: mod_base = OTHER; note = 2'-O-methyl ribonucleotide
  modified_base 2: mod_base = OTHER; note = 2'-O-methyl ribonucleotide
  modified_base 3: mod_base = OTHER; note = 2'-O-methyl ribonucleotide
  modified_base 21: mod_base = OTHER; note = 2'-O-methyl ribonucleotide
  modified_base 28: mod_base = OTHER; note = 2'-O-methyl ribonucleotide
  modified_base 29: mod_base = OTHER; note = 2'-O-methyl ribonucleotide
  modified_base 30: mod_base = OTHER; note = 2'-O-methyl ribonucleotide
  modified_base 31: mod_base = OTHER; note = 2'-O-methyl ribonucleotide
  modified_base 32: mod_base = OTHER; note = 2'-O-methyl ribonucleotide
  modified_base 34: mod_base = OTHER; note = 2'-O-methyl ribonucleotide
  modified_base 35: mod_base = OTHER; note = 2'-O-methyl ribonucleotide
  modified_base 36: mod_base = OTHER; note = 2'-O-methyl ribonucleotide
  modified_base 37: mod_base = OTHER; note = 2'-O-methyl ribonucleotide
  modified_base 38: mod_base = OTHER; note = 2'-O-methyl ribonucleotide
  modified_base 39: mod_base = OTHER; note = 2'-O-methyl ribonucleotide
  modified_base 40: mod_base = OTHER; note = 2'-O-methyl ribonucleotide
  modified_base 41: mod_base = OTHER; note = 2'-O-methyl ribonucleotide
  modified_base 42: mod_base = OTHER; note = 2'-O-methyl ribonucleotide
  modified_base 46: mod_base = OTHER; note = 2'-O-methyl ribonucleotide
  modified_base 48: mod_base = OTHER; note = 2'-O-methyl ribonucleotide
  modified_base 50: mod_base = OTHER; note = 2'-O-methyl ribonucleotide
  modified_base 52: mod_base = OTHER; note = 2'-O-methyl ribonucleotide
  modified_base 53: mod_base = OTHER; note = 2'-O-methyl ribonucleotide
  modified_base 54: mod_base = OTHER; note = 2'-O-methyl ribonucleotide
  modified_base 55: mod_base = OTHER; note = 2'-O-methyl ribonucleotide
  modified_base 56: mod_base = OTHER; note = 2'-O-methyl ribonucleotide
  modified_base 57: mod_base = OTHER; note = 2'-O-methyl ribonucleotide
  modified_base 60: mod_base = OTHER; note = 2'-O-methyl ribonucleotide
  modified_base 61: mod_base = OTHER; note = 2'-O-methyl ribonucleotide
  modified_base 66: mod_base = OTHER; note = 2'-O-methyl ribonucleotide
  modified_base 67: mod_base = OTHER; note = 2'-O-methyl ribonucleotide
  modified_base 70: mod_base = OTHER; note = 2'-O-methyl ribonucleotide
  modified_base 71: mod_base = OTHER; note = 2'-O-methyl ribonucleotide
  modified_base 72: mod_base = OTHER; note = 2'-O-methyl ribonucleotide
  modified_base 74: mod_base = OTHER; note = 2'-O-methyl ribonucleotide
  modified_base 75: mod_base = OTHER; note = 2'-O-methyl ribonucleotide
  modified_base 76: mod_base = OTHER; note = 2'-O-methyl ribonucleotide
  modified_base 77: mod_base = OTHER; note = 2'-O-methyl ribonucleotide
  modified_base 78: mod_base = OTHER; note = 2'-O-methyl ribonucleotide
  modified_base 79: mod_base = OTHER; note = 2'-O-methyl ribonucleotide
  modified_base 80: mod_base = OTHER; note = 2'-O-methyl ribonucleotide
  modified_base 81: mod_base = OTHER; note = 2'-O-methyl ribonucleotide
  modified_base 83: mod_base = OTHER; note = 2'-O-methyl ribonucleotide
  modified_base 84: mod_base = OTHER; note = 2'-O-methyl ribonucleotide
  modified_base 85: mod_base = OTHER; note = 2'-O-methyl ribonucleotide
  modified_base 86: mod_base = OTHER; note = 2'-O-methyl ribonucleotide
  modified_base 87: mod_base = OTHER; note = 2'-O-methyl ribonucleotide
  modified_base 88: mod_base = OTHER; note = 2'-O-methyl ribonucleotide
  modified_base 89: mod_base = OTHER; note = 2'-O-methyl ribonucleotide
  modified_base 90: mod_base = OTHER; note = 2'-O-methyl ribonucleotide
  modified_base 91: mod_base = OTHER; note = 2'-O-methyl ribonucleotide
  modified_base 92: mod_base = OTHER; note = 2'-O-methyl ribonucleotide
  modified_base 93: mod_base = OTHER; note = 2'-O-methyl ribonucleotide
  modified_base 94: mod_base = OTHER; note = 2'-O-methyl ribonucleotide
  modified_base 95: mod_base = OTHER; note = 2'-O-methyl ribonucleotide
  modified_base 96: mod_base = OTHER; note = 2'-O-methyl ribonucleotide
  modified_base 97: mod_base = OTHER; note = 2'-O-methyl ribonucleotide
  modified_base 98: mod_base = OTHER; note = 2'-O-methyl ribonucleotide
  modified_base 99: mod_base = OTHER; note = 2'-O-methyl ribonucleotide
  modified_base 100: mod_base = OTHER; note = 2'-O-methyl ribonucleotide
  modified_base 101: mod_base = OTHER; note = uniform ribonucleotides (A, C, G, inosine or U), deoxynucleotides (A, G, C, inosine or T), ribonebularine, 2'-O-methylnebularine or deoxynebularine
  modified_base 102: mod_base = OTHER; note = uniform ribonucleotides (A, C, G, inosine or U), deoxynucleotides (A, G, C, inosine or T), ribonebularine, 2'-O-methylnebularine or deoxynebularine
  modified_base 103: mod_base = OTHER; note = uniform ribonucleotides (A, C, G, inosine or U), deoxynucleotides (A, G, C, inosine or T), ribonebularine, 2'-O-methylnebularine or deoxynebularine
  modified_base 1..4: mod_base = OTHER; note = phosphorothioate linkage
  modified_base 25..26: mod_base = OTHER; note = phosphorothioate linkage
  modified_base 98..100: mod_base = OTHER; note = phosphorothioate linkage
  misc_feature 1..100: note = RNA
  misc_feature 101..103: note = Optionally DNA or RNA

SEQ ID NO: 3011 - DNA, 103 bp, synthetic construct; identical to SEQ ID NO: 1796
  source 1..103: mol_type = other DNA
  modified_base 1: mod_base = OTHER; note = 2'-O-methyl ribonucleotide
  modified_base 2: mod_base = OTHER; note = 2'-O-methyl ribonucleotide
  modified_base 3: mod_base = OTHER; note = 2'-O-methyl ribonucleotide
  modified_base 21: mod_base = OTHER; note = 2'-O-methyl ribonucleotide
  modified_base 28: mod_base = OTHER; note = 2'-O-methyl ribonucleotide
  modified_base 29: mod_base = OTHER; note = 2'-O-methyl ribonucleotide
  modified_base 30: mod_base = OTHER; note = 2'-O-methyl ribonucleotide
  modified_base 31: mod_base = OTHER; note = 2'-O-methyl ribonucleotide
  modified_base 32: mod_base = OTHER; note = 2'-O-methyl ribonucleotide
  modified_base 33: mod_base = OTHER; note = 2'-O-methyl ribonucleotide
  modified_base 34: mod_base = OTHER; note = 2'-O-methyl ribonucleotide
  modified_base 35: mod_base = OTHER; note = 2'-O-methyl ribonucleotide
  modified_base 36: mod_base = OTHER; note = 2'-O-methyl ribonucleotide
  modified_base 37: mod_base = OTHER; note = 2'-O-methyl ribonucleotide
  modified_base 38: mod_base = OTHER; note = 2'-O-methyl ribonucleotide
  modified_base 39: mod_base = OTHER; note = 2'-O-methyl ribonucleotide
  modified_base 40: mod_base = OTHER; note = 2'-O-methyl ribonucleotide
  modified_base 41: mod_base = OTHER; note = 2'-O-methyl ribonucleotide
  modified_base 42: mod_base = OTHER; note = 2'-O-methyl ribonucleotide
  modified_base 46: mod_base = OTHER; note = 2'-O-methyl ribonucleotide
  modified_base 48: mod_base = OTHER; note = 2'-O-methyl ribonucleotide
  modified_base 50: mod_base = OTHER; note = 2'-O-methyl ribonucleotide
  modified_base 52: mod_base = OTHER; note = 2'-O-methyl ribonucleotide
  modified_base 53: mod_base = OTHER; note = 2'-O-methyl ribonucleotide
  modified_base 54: mod_base = OTHER; note = 2'-O-methyl ribonucleotide
  modified_base 55: mod_base = OTHER; note = 2'-O-methyl ribonucleotide
  modified_base 56: mod_base = OTHER; note = 2'-O-methyl ribonucleotide
  modified_base 57: mod_base = OTHER; note = 2'-O-methyl ribonucleotide
  modified_base 60: mod_base = OTHER; note = 2'-O-methyl ribonucleotide
  modified_base 61: mod_base = OTHER; note = 2'-O-methyl ribonucleotide
  modified_base 66: mod_base = OTHER; note = 2'-O-methyl ribonucleotide
  modified_base 67: mod_base = OTHER; note = 2'-O-methyl ribonucleotide
  modified_base 70: mod_base = OTHER; note = 2'-O-methyl ribonucleotide
  modified_base 71: mod_base = OTHER; note = 2'-O-methyl ribonucleotide
  modified_base 72: mod_base = OTHER; note = 2'-O-methyl ribonucleotide
  modified_base 73: mod_base = OTHER; note = 2'-O-methyl ribonucleotide
  modified_base 74: mod_base = OTHER; note = 2'-O-methyl ribonucleotide
  modified_base 75: mod_base = OTHER; note = 2'-O-methyl ribonucleotide
  modified_base 76: mod_base = OTHER; note = 2'-O-methyl ribonucleotide
  modified_base 77: mod_base = OTHER; note = 2'-O-methyl ribonucleotide
  modified_base 78: mod_base = OTHER; note = 2'-O-methyl ribonucleotide
  modified_base 79: mod_base = OTHER; note = 2'-O-methyl ribonucleotide
  modified_base 80: mod_base = OTHER; note = 2'-O-methyl ribonucleotide
  modified_base 81: mod_base = OTHER; note = 2'-O-methyl ribonucleotide
  modified_base 83: mod_base = OTHER; note = 2'-O-methyl ribonucleotide
  modified_base 84: mod_base = OTHER; note = 2'-O-methyl ribonucleotide
  modified_base 85: mod_base = OTHER; note = 2'-O-methyl ribonucleotide
  modified_base 86: mod_base = OTHER; note = 2'-O-methyl ribonucleotide
  modified_base 87: mod_base = OTHER; note = 2'-O-methyl ribonucleotide
  modified_base 88: mod_base = OTHER; note = 2'-O-methyl ribonucleotide
  modified_base 89: mod_base = OTHER; note = 2'-O-methyl ribonucleotide
  modified_base 90: mod_base = OTHER; note = 2'-O-methyl ribonucleotide
  modified_base 91: mod_base = OTHER; note = 2'-O-methyl ribonucleotide
  modified_base 92: mod_base = OTHER; note = 2'-O-methyl ribonucleotide
  modified_base 93: mod_base = OTHER; note = 2'-O-methyl ribonucleotide
  modified_base 94: mod_base = OTHER; note = 2'-O-methyl ribonucleotide
  modified_base 95: mod_base = OTHER; note = 2'-O-methyl ribonucleotide
  modified_base 96: mod_base = OTHER; note = 2'-O-methyl ribonucleotide
  modified_base 97: mod_base = OTHER; note = 2'-O-methyl ribonucleotide
  modified_base 98: mod_base = OTHER; note = 2'-O-methyl ribonucleotide
  modified_base 99: mod_base = OTHER; note = 2'-O-methyl ribonucleotide
  modified_base 100: mod_base = OTHER; note = 2'-O-methyl ribonucleotide
  modified_base 101: mod_base = OTHER; note = uniform ribonucleotides (A, C, G, inosine or U), deoxynucleotides (A, G, C, inosine or T), ribonebularine, 2'-O-methylnebularine or deoxynebularine
  modified_base 102: mod_base = OTHER; note = uniform ribonucleotides (A, C, G, inosine or U), deoxynucleotides (A, G, C, inosine or T), ribonebularine, 2'-O-methylnebularine or deoxynebularine
  modified_base 103: mod_base = OTHER; note = uniform ribonucleotides (A, C, G, inosine or U), deoxynucleotides (A, G, C, inosine or T), ribonebularine, 2'-O-methylnebularine or deoxynebularine
  modified_base 1..4: mod_base = OTHER; note = phosphorothioate linkage
  modified_base 25..26: mod_base = OTHER; note = phosphorothioate linkage
  modified_base 98..100: mod_base = OTHER; note = phosphorothioate linkage
  misc_feature 1..100: note = RNA
  misc_feature 101..103: note = Optionally DNA or RNA

SEQ ID NO: 3012 - DNA, 103 bp, synthetic construct; identical to SEQ ID NO: 1796
  source 1..103: mol_type = other DNA
  modified_base 1: mod_base = OTHER; note = 2'-O-methyl ribonucleotide
  modified_base 2: mod_base = OTHER; note = 2'-O-methyl ribonucleotide
  modified_base 3: mod_base = OTHER; note = 2'-O-methyl ribonucleotide
  modified_base 21: mod_base = OTHER; note = 2'-O-methyl ribonucleotide
  modified_base 28: mod_base = OTHER; note = 2'-O-methyl ribonucleotide
  modified_base 29: mod_base = OTHER; note = 2'-O-methyl ribonucleotide
  modified_base 30: mod_base = OTHER; note = 2'-O-methyl ribonucleotide
  modified_base 31: mod_base = OTHER; note = 2'-O-methyl ribonucleotide
  modified_base 32: mod_base = OTHER; note = 2'-O-methyl ribonucleotide
  modified_base 34: mod_base = OTHER; note = 2'-O-methyl ribonucleotide
  modified_base 35: mod_base = OTHER; note = 2'-O-methyl ribonucleotide
  modified_base 36: mod_base = OTHER; note = 2'-O-methyl ribonucleotide
  modified_base 37: mod_base = OTHER; note = 2'-O-methyl ribonucleotide
  modified_base 38: mod_base = OTHER; note = 2'-O-methyl ribonucleotide
  modified_base 39: mod_base = OTHER; note = 2'-O-methyl ribonucleotide
  modified_base 40: mod_base = OTHER; note = 2'-O-methyl ribonucleotide
  modified_base 41: mod_base = OTHER; note = 2'-O-methyl ribonucleotide
  modified_base 42: mod_base = OTHER; note = 2'-O-methyl ribonucleotide
  modified_base 46: mod_base = OTHER; note = 2'-O-methyl ribonucleotide
  modified_base 48: mod_base = OTHER; note = 2'-O-methyl ribonucleotide
  modified_base 50: mod_base = OTHER; note = 2'-O-methyl ribonucleotide
  modified_base 52: mod_base = OTHER; note = 2'-O-methyl ribonucleotide
  modified_base 53: mod_base = OTHER; note = 2'-O-methyl ribonucleotide
  modified_base 54: mod_base = OTHER; note = 2'-O-methyl ribonucleotide
  modified_base 55: mod_base = OTHER; note = 2'-O-methyl ribonucleotide
  modified_base 56: mod_base = OTHER; note = 2'-O-methyl ribonucleotide
  modified_base 57: mod_base = OTHER; note = 2'-O-methyl ribonucleotide
  modified_base 60: mod_base = OTHER; note = 2'-O-methyl ribonucleotide
  modified_base 61: mod_base = OTHER; note = 2'-O-methyl ribonucleotide
  modified_base 66: mod_base = OTHER; note = 2'-O-methyl ribonucleotide
  modified_base 67: mod_base = OTHER; note = 2'-O-methyl ribonucleotide
  modified_base 70: mod_base = OTHER; note = 2'-O-methyl ribonucleotide
  modified_base 71: mod_base = OTHER; note = 2'-O-methyl ribonucleotide
  modified_base 72: mod_base = OTHER; note = 2'-O-methyl ribonucleotide
  modified_base 74: mod_base = OTHER; note = 2'-O-methyl ribonucleotide
  modified_base 75: mod_base = OTHER; note = 2'-O-methyl ribonucleotide
  modified_base 76: mod_base = OTHER; note = 2'-O-methyl ribonucleotide
  modified_base 77: mod_base = OTHER; note = 2'-O-methyl ribonucleotide
  modified_base 78: mod_base = OTHER; note = 2'-O-methyl ribonucleotide
  modified_base 79: mod_base = OTHER; note = 2'-O-methyl ribonucleotide
  modified_base 80: mod_base = OTHER; note = 2'-O-methyl ribonucleotide
  modified_base 81: mod_base = OTHER; note = 2'-O-methyl ribonucleotide
  modified_base 83: mod_base = OTHER; note = 2'-O-methyl ribonucleotide
  modified_base 84: mod_base = OTHER; note = 2'-O-methyl ribonucleotide
  modified_base 85: mod_base = OTHER; note = 2'-O-methyl ribonucleotide
  modified_base 86: mod_base = OTHER; note = 2'-O-methyl ribonucleotide
  modified_base 87: mod_base = OTHER; note = 2'-O-methyl ribonucleotide
  modified_base 88: mod_base = OTHER; note = 2'-O-methyl ribonucleotide
  modified_base 89: mod_base = OTHER; note = 2'-O-methyl ribonucleotide
  modified_base 90: mod_base = OTHER; note = 2'-O-methyl ribonucleotide
  modified_base 91: mod_base = OTHER; note = 2'-O-methyl ribonucleotide
  modified_base 92: mod_base = OTHER; note = 2'-O-methyl ribonucleotide
  modified_base 93: mod_base = OTHER; note = 2'-O-methyl ribonucleotide
  modified_base 94: mod_base = OTHER; note = 2'-O-methyl ribonucleotide
  modified_base 95: mod_base = OTHER; note = 2'-O-methyl ribonucleotide
  modified_base 96: mod_base = OTHER; note = 2'-O-methyl ribonucleotide
  modified_base 97: mod_base = OTHER; note = 2'-O-methyl ribonucleotide
  modified_base 98: mod_base = OTHER; note = 2'-O-methyl ribonucleotide
  modified_base 99: mod_base = OTHER; note = 2'-O-methyl ribonucleotide
  modified_base 100: mod_base = OTHER; note = 2'-O-methyl ribonucleotide
  modified_base 101: mod_base = OTHER; note = uniform ribonucleotides (A, C, G, inosine or U), deoxynucleotides (A, G, C, inosine or T), ribonebularine, 2'-O-methylnebularine or deoxynebularine
  modified_base 102: mod_base = OTHER; note = uniform ribonucleotides (A, C, G, inosine or U), deoxynucleotides (A, G, C, inosine or T), ribonebularine, 2'-O-methylnebularine or deoxynebularine
  modified_base 103: mod_base = OTHER; note = uniform ribonucleotides (A, C, G, inosine or U), deoxynucleotides (A, G, C, inosine or T), ribonebularine, 2'-O-methylnebularine or deoxynebularine
  modified_base 1..4: mod_base = OTHER; note = phosphorothioate linkage
  modified_base 25..26: mod_base = OTHER; note = phosphorothioate linkage
  modified_base 98..100: mod_base = OTHER; note = phosphorothioate linkage
  misc_feature 1..100: note = RNA
  misc_feature 101..103: note = Optionally DNA or RNA

SEQ ID NO: 3013 - DNA, 103 bp, synthetic construct; identical to SEQ ID NO: 1797
  source 1..103: mol_type = other DNA
  modified_base 1: mod_base = OTHER; note = 2'-O-methyl ribonucleotide
  modified_base 2: mod_base = OTHER; note = 2'-O-methyl ribonucleotide
  modified_base 3: mod_base = OTHER; note = 2'-O-methyl ribonucleotide
  modified_base 21: mod_base = OTHER; note = 2'-O-methyl ribonucleotide
  modified_base 28: mod_base = OTHER; note = 2'-O-methyl ribonucleotide
  modified_base 29: mod_base = OTHER; note = 2'-O-methyl ribonucleotide
  modified_base 30: mod_base = OTHER; note = 2'-O-methyl ribonucleotide
  modified_base 31: mod_base = OTHER; note = 2'-O-methyl ribonucleotide
  modified_base 32: mod_base = OTHER; note = 2'-O-methyl ribonucleotide
  modified_base 33: mod_base = OTHER; note = 2'-O-methyl ribonucleotide
  modified_base 34: mod_base = OTHER; note = 2'-O-methyl ribonucleotide
  modified_base 35: mod_base = OTHER; note = 2'-O-methyl ribonucleotide
  modified_base 36: mod_base = OTHER; note = 2'-O-methyl ribonucleotide
  modified_base 37: mod_base = OTHER; note = 2'-O-methyl ribonucleotide
  modified_base 38: mod_base = OTHER; note = 2'-O-methyl ribonucleotide
  modified_base 39: mod_base = OTHER; note = 2'-O-methyl ribonucleotide
  modified_base 40: mod_base = OTHER; note = 2'-O-methyl ribonucleotide
  modified_base 41: mod_base = OTHER; note = 2'-O-methyl ribonucleotide
  modified_base 42: mod_base = OTHER; note = 2'-O-methyl ribonucleotide
  modified_base 46: mod_base = OTHER; note = 2'-O-methyl ribonucleotide
  modified_base 48: mod_base = OTHER; note = 2'-O-methyl ribonucleotide
  modified_base 50: mod_base = OTHER; note = 2'-O-methyl ribonucleotide
  modified_base 52: mod_base = OTHER; note = 2'-O-methyl ribonucleotide
  modified_base 53: mod_base = OTHER; note = 2'-O-methyl ribonucleotide
  modified_base 54: mod_base = OTHER; note = 2'-O-methyl ribonucleotide
  modified_base 57: mod_base = OTHER; note = 2'-O-methyl ribonucleotide
  modified_base 61: mod_base = OTHER; note = 2'-O-methyl ribonucleotide
  modified_base 66: mod_base = OTHER; note = 2'-O-methyl ribonucleotide
  modified_base 67: mod_base = OTHER; note = 2'-O-methyl ribonucleotide
  modified_base 70: mod_base = OTHER; note = 2'-O-methyl ribonucleotide
  modified_base 71: mod_base = OTHER; note = 2'-O-methyl ribonucleotide
  modified_base 72: mod_base = OTHER; note = 2'-O-methyl ribonucleotide
  modified_base 74: mod_base = OTHER; note = 2'-O-methyl ribonucleotide
  modified_base 75: mod_base = OTHER; note = 2'-O-methyl ribonucleotide
  modified_base 76: mod_base = OTHER; note = 2'-O-methyl ribonucleotide
  modified_base 77: mod_base = OTHER; note = 2'-O-methyl ribonucleotide
  modified_base 78: mod_base = OTHER; note = 2'-O-methyl ribonucleotide
  modified_base 79: mod_base = OTHER; note = 2'-O-methyl ribonucleotide
  modified_base 80: mod_base = OTHER; note = 2'-O-methyl ribonucleotide
  modified_base 82: mod_base = OTHER; note = 2'-O-methyl ribonucleotide
  modified_base 83: mod_base = OTHER; note = 2'-O-methyl ribonucleotide
  modified_base 84: mod_base = OTHER; note = 2'-O-methyl ribonucleotide
  modified_base 85: mod_base = OTHER; note = 2'-O-methyl ribonucleotide
  modified_base 86: mod_base = OTHER; note = 2'-O-methyl ribonucleotide
  modified_base 87: mod_base = OTHER; note = 2'-O-methyl ribonucleotide
  modified_base 89: mod_base = OTHER; note = 2'-O-methyl ribonucleotide
  modified_base 92: mod_base = OTHER; note = 2'-O-methyl ribonucleotide
  modified_base 93: mod_base = OTHER; note = 2'-O-methyl ribonucleotide
  modified_base 94: mod_base = OTHER; note = 2'-O-methyl ribonucleotide
  modified_base 95: mod_base = OTHER; note = 2'-O-methyl ribonucleotide
  modified_base 96: mod_base = OTHER; note = 2'-O-methyl ribonucleotide
  modified_base 97: mod_base = OTHER; note = 2'-O-methyl ribonucleotide
  modified_base 98: mod_base = OTHER; note = 2'-O-methyl ribonucleotide
  modified_base 99: mod_base = OTHER; note = 2'-O-methyl ribonucleotide
  modified_base 100: mod_base = OTHER; note = 2'-O-methyl ribonucleotide
  modified_base 101: mod_base = OTHER; note = uniform ribonucleotides (A, C, G, inosine or U), deoxynucleotides (A, G, C, inosine or T), ribonebularine, 2'-O-methylnebularine or deoxynebularine
  modified_base 102: mod_base = OTHER; note = uniform ribonucleotides (A, C, G, inosine or U), deoxynucleotides (A, G, C, inosine or T), ribonebularine, 2'-O-methylnebularine or deoxynebularine
  modified_base 103: mod_base = OTHER; note = uniform ribonucleotides (A, C, G, inosine or U), deoxynucleotides (A, G, C, inosine or T), ribonebularine, 2'-O-methylnebularine or deoxynebularine
  modified_base 1..4: mod_base = OTHER; note = phosphorothioate linkage
  modified_base 25..26: mod_base = OTHER; note = phosphorothioate linkage
  modified_base 98..100: mod_base = OTHER; note = phosphorothioate linkage
  misc_feature 1..100: note = RNA
  misc_feature 101..103: note = Optionally DNA or RNA

SEQ ID NO: 3014 - DNA, 103 bp, synthetic construct; identical to SEQ ID NO: 1797
  source 1..103: mol_type = other DNA
  modified_base 1: mod_base = OTHER; note = 2'-O-methyl ribonucleotide
  modified_base 2: mod_base = OTHER; note = 2'-O-methyl ribonucleotide
  modified_base 3: mod_base = OTHER; note = 2'-O-methyl ribonucleotide
  modified_base 21: mod_base = OTHER; note = 2'-O-methyl ribonucleotide
  modified_base 28: mod_base = OTHER; note = 2'-O-methyl ribonucleotide
  modified_base 29: mod_base = OTHER; note = 2'-O-methyl ribonucleotide
  modified_base 30: mod_base = OTHER; note = 2'-O-methyl ribonucleotide
  modified_base 31: mod_base = OTHER; note = 2'-O-methyl ribonucleotide
  modified_base 32: mod_base = OTHER; note = 2'-O-methyl ribonucleotide
  modified_base 33: mod_base = OTHER; note = 2'-O-methyl ribonucleotide
  modified_base 34: mod_base = OTHER; note = 2'-O-methyl ribonucleotide
  modified_base 35: mod_base = OTHER; note = 2'-O-methyl ribonucleotide
  modified_base 36: mod_base = OTHER; note = 2'-O-methyl ribonucleotide
  modified_base 37: mod_base = OTHER; note = 2'-O-methyl ribonucleotide
  modified_base 38: mod_base = OTHER; note = 2'-O-methyl ribonucleotide
  modified_base 39: mod_base = OTHER; note = 2'-O-methyl ribonucleotide
  modified_base 40: mod_base = OTHER; note = 2'-O-methyl ribonucleotide
  modified_base 41: mod_base = OTHER; note = 2'-O-methyl ribonucleotide
  modified_base 42: mod_base = OTHER; note = 2'-O-methyl ribonucleotide
  modified_base 46: mod_base = OTHER; note = 2'-O-methyl ribonucleotide
  modified_base 48: mod_base = OTHER; note = 2'-O-methyl ribonucleotide
  modified_base 50: mod_base = OTHER; note = 2'-O-methyl ribonucleotide
  modified_base 52: mod_base = OTHER; note = 2'-O-methyl ribonucleotide
  modified_base 53: mod_base = OTHER; note = 2'-O-methyl ribonucleotide
  modified_base 54: mod_base = OTHER; note = 2'-O-methyl ribonucleotide
  modified_base 55: mod_base = OTHER; note = 2'-O-methyl ribonucleotide
  modified_base 56: mod_base = OTHER; note = 2'-O-methyl ribonucleotide
  modified_base 57: mod_base = OTHER; note = 2'-O-methyl ribonucleotide
  modified_base 60: mod_base = OTHER; note = 2'-O-methyl ribonucleotide
  modified_base 61: mod_base = OTHER; note = 2'-O-methyl ribonucleotide
  modified_base 66: mod_base = OTHER; note = 2'-O-methyl ribonucleotide
  modified_base 67: mod_base = OTHER; note = 2'-O-methyl ribonucleotide
  modified_base 70: mod_base = OTHER; note = 2'-O-methyl ribonucleotide
  modified_base 71: mod_base = OTHER; note = 2'-O-methyl ribonucleotide
  modified_base 72: mod_base = OTHER; note = 2'-O-methyl ribonucleotide
  modified_base 74: mod_base = OTHER; note = 2'-O-methyl ribonucleotide
  modified_base 75: mod_base = OTHER; note = 2'-O-methyl ribonucleotide
  modified_base 76: mod_base = OTHER; note = 2'-O-methyl ribonucleotide
  modified_base 77: mod_base = OTHER; note = 2'-O-methyl ribonucleotide
  modified_base 78: mod_base = OTHER; note = 2'-O-methyl ribonucleotide
  modified_base 79: mod_base = OTHER; note = 2'-O-methyl ribonucleotide
  modified_base 80: mod_base = OTHER; note = 2'-O-methyl ribonucleotide
  modified_base 82: mod_base = OTHER; note = 2'-O-methyl ribonucleotide
  modified_base 83: mod_base = OTHER; note = 2'-O-methyl ribonucleotide
  modified_base 84: mod_base = OTHER; note = 2'-O-methyl ribonucleotide
  modified_base 85: mod_base = OTHER; note = 2'-O-methyl ribonucleotide
  modified_base 86: mod_base = OTHER; note = 2'-O-methyl ribonucleotide
  modified_base 87: mod_base = OTHER; note = 2'-O-methyl ribonucleotide
  modified_base 89: mod_base = OTHER; note = 2'-O-methyl ribonucleotide
  modified_base 92: mod_base = OTHER; note = 2'-O-methyl ribonucleotide
  modified_base 93: mod_base = OTHER; note = 2'-O-methyl ribonucleotide
  modified_base 94: mod_base = OTHER; note = 2'-O-methyl ribonucleotide
  modified_base 95: mod_base = OTHER; note = 2'-O-methyl ribonucleotide
  modified_base 96: mod_base = OTHER; note = 2'-O-methyl ribonucleotide
  modified_base 97: mod_base = OTHER; note = 2'-O-methyl ribonucleotide
  modified_base 98: mod_base = OTHER; note = 2'-O-methyl ribonucleotide
  modified_base 99: mod_base = OTHER; note = 2'-O-methyl ribonucleotide
  modified_base 100: mod_base = OTHER; note = 2'-O-methyl ribonucleotide
  modified_base 101: mod_base = OTHER; note = uniform ribonucleotides (A, C, G, inosine or U), deoxynucleotides (A, G, C, inosine or T), ribonebularine, 2'-O-methylnebularine or deoxynebularine
  modified_base 102: mod_base = OTHER; note = uniform ribonucleotides (A, C, G, inosine or U), deoxynucleotides (A, G, C, inosine or T), ribonebularine, 2'-O-methylnebularine or deoxynebularine
  modified_base 103: mod_base = OTHER; note = uniform ribonucleotides (A, C, G, inosine or U), deoxynucleotides (A, G, C, inosine or T), ribonebularine, 2'-O-methylnebularine or deoxynebularine
  modified_base 1..4: mod_base = OTHER; note = phosphorothioate linkage
  modified_base 25..26: mod_base = OTHER; note = phosphorothioate linkage
  modified_base 98..100: mod_base = OTHER; note = phosphorothioate linkage
  misc_feature 1..100: note = RNA
  misc_feature 101..103: note = Optionally DNA or RNA

SEQ ID NO: 3015 - DNA, 103 bp, synthetic construct; identical to SEQ ID NO: 1797
  source 1..103: mol_type = other DNA
  modified_base 1: mod_base = OTHER; note = 2'-O-methyl ribonucleotide
  modified_base 2: mod_base = OTHER; note = 2'-O-methyl ribonucleotide
  modified_base 3: mod_base = OTHER; note = 2'-O-methyl ribonucleotide
  modified_base 21: mod_base = OTHER; note = 2'-O-methyl ribonucleotide
  modified_base 28: mod_base = OTHER; note = 2'-O-methyl ribonucleotide
  modified_base 29: mod_base = OTHER; note = 2'-O-methyl ribonucleotide
  modified_base 30: mod_base = OTHER; note = 2'-O-methyl ribonucleotide
  modified_base 31: mod_base = OTHER; note = 2'-O-methyl ribonucleotide
  modified_base 32: mod_base = OTHER; note = 2'-O-methyl ribonucleotide
  modified_base 33: mod_base = OTHER; note = 2'-O-methyl ribonucleotide
  modified_base 34: mod_base = OTHER; note = 2'-O-methyl ribonucleotide
  modified_base 35: mod_base = OTHER; note = 2'-O-methyl ribonucleotide
  modified_base 36: mod_base = OTHER; note = 2'-O-methyl ribonucleotide
  modified_base 37: mod_base = OTHER; note = 2'-O-methyl ribonucleotide
  modified_base 38: mod_base = OTHER; note = 2'-O-methyl ribonucleotide
  modified_base 39: mod_base = OTHER; note = 2'-O-methyl ribonucleotide
  modified_base 40: mod_base = OTHER; note = 2'-O-methyl ribonucleotide
  modified_base 41: mod_base = OTHER; note = 2'-O-methyl ribonucleotide
  modified_base 42: mod_base = OTHER; note = 2'-O-methyl ribonucleotide
  modified_base 46: mod_base = OTHER; note = 2'-O-methyl ribonucleotide
  modified_base 48: mod_base = OTHER; note = 2'-O-methyl ribonucleotide
  modified_base 50: mod_base = OTHER; note = 2'-O-methyl ribonucleotide
  modified_base 52: mod_base = OTHER; note = 2'-O-methyl ribonucleotide
  modified_base 53: mod_base = OTHER; note = 2'-O-methyl ribonucleotide
  modified_base 54: mod_base = OTHER; note = 2'-O-methyl ribonucleotide
  modified_base 57: mod_base = OTHER; note = 2'-O-methyl ribonucleotide
  modified_base 61: mod_base = OTHER; note = 2'-O-methyl ribonucleotide
  modified_base 66: mod_base = OTHER; note = 2'-O-methyl ribonucleotide
  modified_base 67: mod_base = OTHER; note = 2'-O-methyl ribonucleotide
  modified_base 70: mod_base = OTHER; note = 2'-O-methyl ribonucleotide
  modified_base 71: mod_base = OTHER; note = 2'-O-methyl ribonucleotide
  modified_base 72: mod_base = OTHER; note = 2'-O-methyl ribonucleotide
  modified_base 73: mod_base = OTHER; note = 2'-O-methyl ribonucleotide
  modified_base 74: mod_base = OTHER; note = 2'-O-methyl ribonucleotide
  modified_base 75: mod_base = OTHER; note = 2'-O-methyl ribonucleotide
  modified_base 76: mod_base = OTHER; note = 2'-O-methyl ribonucleotide
  modified_base 77: mod_base = OTHER; note = 2'-O-methyl ribonucleotide
  modified_base 78: mod_base = OTHER; note = 2'-O-methyl ribonucleotide
  modified_base 79: mod_base = OTHER; note = 2'-O-methyl ribonucleotide
  modified_base 80: mod_base = OTHER; note = 2'-O-methyl ribonucleotide
  modified_base 82: mod_base = OTHER; note = 2'-O-methyl ribonucleotide
  modified_base 83: mod_base = OTHER; note = 2'-O-methyl ribonucleotide
  modified_base 84: mod_base = OTHER; note = 2'-O-methyl ribonucleotide
  modified_base 85: mod_base = OTHER; note = 2'-O-methyl ribonucleotide
  modified_base 86: mod_base = OTHER; note = 2'-O-methyl ribonucleotide
  modified_base 87: mod_base = OTHER; note = 2'-O-methyl ribonucleotide
  modified_base 89: mod_base = OTHER; note = 2'-O-methyl ribonucleotide
  modified_base 92: mod_base = OTHER; note = 2'-O-methyl ribonucleotide
  modified_base 93: mod_base = OTHER; note = 2'-O-methyl ribonucleotide
  modified_base 94: mod_base = OTHER; note = 2'-O-methyl ribonucleotide
  modified_base 95: mod_base = OTHER; note = 2'-O-methyl ribonucleotide
  modified_base 96: mod_base = OTHER; note = 2'-O-methyl ribonucleotide
  modified_base 97: mod_base = OTHER; note = 2'-O-methyl ribonucleotide
  modified_base 98: mod_base = OTHER; note = 2'-O-methyl ribonucleotide
  modified_base 99: mod_base = OTHER; note = 2'-O-methyl ribonucleotide
  modified_base 100: mod_base = OTHER; note = 2'-O-methyl ribonucleotide
  modified_base 101: mod_base = OTHER; note = uniform ribonucleotides (A, C, G, inosine or U), deoxynucleotides (A, G, C, inosine or T), ribonebularine, 2'-O-methylnebularine or deoxynebularine
  modified_base 102: mod_base = OTHER; note = uniform ribonucleotides (A, C, G, inosine or U), deoxynucleotides (A, G, C, inosine or T), ribonebularine, 2'-O-methylnebularine or deoxynebularine
  modified_base 103: mod_base = OTHER; note = uniform ribonucleotides (A, C, G, inosine or U), deoxynucleotides (A, G, C, inosine or T), ribonebularine, 2'-O-methylnebularine or deoxynebularine
  modified_base 1..4: mod_base = OTHER; note = phosphorothioate linkage
  modified_base 25..26: mod_base = OTHER; note = phosphorothioate linkage
  modified_base 98..100: mod_base = OTHER; note = phosphorothioate linkage
  misc_feature 1..100: note = RNA
  misc_feature 101..103: note = Optionally DNA or RNA

SEQ ID NO: 3016 - DNA, 103 bp, synthetic construct; identical to SEQ ID NO: 1797
  source 1..103: mol_type = other DNA
  modified_base 1: mod_base = OTHER; note = 2'-O-methyl ribonucleotide
  modified_base 2: mod_base = OTHER; note = 2'-O-methyl ribonucleotide
  modified_base 3: mod_base = OTHER; note = 2'-O-methyl ribonucleotide
  modified_base 21: mod_base = OTHER; note = 2'-O-methyl ribonucleotide
  modified_base 28: mod_base = OTHER; note = 2'-O-methyl ribonucleotide
  modified_base 29: mod_base = OTHER; note = 2'-O-methyl ribonucleotide
  modified_base 30: mod_base = OTHER; note = 2'-O-methyl ribonucleotide
  modified_base 31: mod_base = OTHER; note = 2'-O-methyl ribonucleotide
  modified_base 32: mod_base = OTHER; note = 2'-O-methyl ribonucleotide
  modified_base 33: mod_base = OTHER; note = 2'-O-methyl ribonucleotide
  modified_base 34: mod_base = OTHER; note = 2'-O-methyl ribonucleotide
  modified_base 35: mod_base = OTHER; note = 2'-O-methyl ribonucleotide
  modified_base 36: mod_base = OTHER; note = 2'-O-methyl ribonucleotide
  modified_base 37: mod_base = OTHER; note = 2'-O-methyl ribonucleotide
  modified_base 38: mod_base = OTHER; note = 2'-O-methyl ribonucleotide
  modified_base 39: mod_base = OTHER; note = 2'-O-methyl ribonucleotide
  modified_base 40: mod_base = OTHER; note = 2'-O-methyl ribonucleotide
  modified_base 41: mod_base = OTHER; note = 2'-O-methyl ribonucleotide
  modified_base 42: mod_base = OTHER; note = 2'-O-methyl ribonucleotide
  modified_base 46: mod_base = OTHER; note = 2'-O-methyl ribonucleotide
  modified_base 48: mod_base = OTHER; note = 2'-O-methyl ribonucleotide
  modified_base 50: mod_base = OTHER; note = 2'-O-methyl ribonucleotide
  modified_base 52: mod_base = OTHER; note = 2'-O-methyl ribonucleotide
  modified_base 53: mod_base = OTHER; note = 2'-O-methyl ribonucleotide
  modified_base 54: mod_base = OTHER; note = 2'-O-methyl ribonucleotide
  modified_base 57: mod_base = OTHER; note = 2'-O-methyl ribonucleotide
  modified_base 61: mod_base = OTHER; note = 2'-O-methyl ribonucleotide
  modified_base 66: mod_base = OTHER; note = 2'-O-methyl ribonucleotide
  modified_base 67: mod_base = OTHER; note = 2'-O-methyl ribonucleotide
  modified_base 70: mod_base = OTHER; note = 2'-O-methyl ribonucleotide
  modified_base 71: mod_base = OTHER; note = 2'-O-methyl ribonucleotide
  modified_base 72: mod_base = OTHER; note = 2'-O-methyl ribonucleotide
  modified_base 73: mod_base = OTHER; note = 2'-O-methyl ribonucleotide
  modified_base 74: mod_base = OTHER; note = 2'-O-methyl ribonucleotide
  modified_base 75: mod_base = OTHER; note = 2'-O-methyl ribonucleotide
  modified_base 76: mod_base = OTHER; note = 2'-O-methyl ribonucleotide
  modified_base 77: mod_base = OTHER; note = 2'-O-methyl ribonucleotide
  modified_base 78: mod_base = OTHER; note = 2'-O-methyl ribonucleotide
  modified_base 79: mod_base = OTHER; note = 2'-O-methyl ribonucleotide
  modified_base 80: mod_base = OTHER; note = 2'-O-methyl ribonucleotide
  modified_base 82: mod_base = OTHER; note = 2'-O-methyl ribonucleotide
  modified_base 83: mod_base = OTHER; note = 2'-O-methyl ribonucleotide
  modified_base 84: mod_base = OTHER; note = 2'-O-methyl ribonucleotide
  modified_base 85: mod_base = OTHER; note = 2'-O-methyl ribonucleotide
  modified_base 86: mod_base = OTHER; note = 2'-O-methyl ribonucleotide
  modified_base 87: mod_base = OTHER; note = 2'-O-methyl ribonucleotide
  modified_base 89: mod_base = OTHER; note = 2'-O-methyl ribonucleotide
  modified_base 91: mod_base = OTHER; note = 2'-O-methyl ribonucleotide
  modified_base 92: mod_base = OTHER; note = 2'-O-methyl ribonucleotide
  modified_base 93: mod_base = OTHER; note = 2'-O-methyl ribonucleotide
  modified_base 94: mod_base = OTHER; note = 2'-O-methyl ribonucleotide
  modified_base 95: mod_base = OTHER; note = 2'-O-methyl ribonucleotide
  modified_base 96: mod_base = OTHER; note = 2'-O-methyl ribonucleotide
  modified_base 97: mod_base = OTHER; note = 2'-O-methyl ribonucleotide
  modified_base 98: mod_base = OTHER; note = 2'-O-methyl ribonucleotide
  modified_base 99: mod_base = OTHER; note = 2'-O-methyl ribonucleotide
  modified_base 100: mod_base = OTHER; note = 2'-O-methyl ribonucleotide
  modified_base 101: mod_base = OTHER; note = uniform ribonucleotides (A, C, G, inosine or U), deoxynucleotides (A, G, C, inosine or T), ribonebularine, 2'-O-methylnebularine or deoxynebularine
  modified_base 102: mod_base = OTHER; note = uniform ribonucleotides (A, C, G, inosine or U), deoxynucleotides (A, G, C, inosine or T), ribonebularine, 2'-O-methylnebularine or deoxynebularine
  modified_base 103: mod_base = OTHER; note = uniform ribonucleotides (A, C, G, inosine or U), deoxynucleotides (A, G, C, inosine or T), ribonebularine, 2'-O-methylnebularine or deoxynebularine
  modified_base 1..4: mod_base = OTHER; note = phosphorothioate linkage
  modified_base 25..26: mod_base = OTHER; note = phosphorothioate linkage
  modified_base 98..100: mod_base = OTHER; note = phosphorothioate linkage
  misc_feature 1..100: note = RNA
  misc_feature 101..103: note = Optionally DNA or RNA

SEQ ID NO: 3017 - DNA, 103 bp, synthetic construct; identical to SEQ ID NO: 1797
  source 1..103: mol_type = other DNA
  modified_base 1: mod_base = OTHER; note = 2'-O-methyl ribonucleotide
  modified_base 2: mod_base = OTHER; note = 2'-O-methyl ribonucleotide
  modified_base 3: mod_base = OTHER; note = 2'-O-methyl ribonucleotide
  modified_base 21: mod_base = OTHER; note = 2'-O-methyl ribonucleotide
  modified_base 28: mod_base = OTHER; note = 2'-O-methyl ribonucleotide
  modified_base 29: mod_base = OTHER; note = 2'-O-methyl ribonucleotide
  modified_base 30: mod_base = OTHER; note = 2'-O-methyl ribonucleotide
  modified_base 31: mod_base = OTHER; note = 2'-O-methyl ribonucleotide
  modified_base 32: mod_base = OTHER; note = 2'-O-methyl ribonucleotide
  modified_base 34: mod_base = OTHER; note = 2'-O-methyl ribonucleotide
  modified_base 35: mod_base = OTHER; note = 2'-O-methyl ribonucleotide
  modified_base 36: mod_base = OTHER; note = 2'-O-methyl ribonucleotide
  modified_base 37: mod_base = OTHER; note = 2'-O-methyl ribonucleotide
  modified_base 38: mod_base = OTHER; note = 2'-O-methyl ribonucleotide
  modified_base 39: mod_base = OTHER; note = 2'-O-methyl ribonucleotide
  modified_base 40: mod_base = OTHER; note = 2'-O-methyl ribonucleotide
  modified_base 41: mod_base = OTHER; note = 2'-O-methyl ribonucleotide
  modified_base 42: mod_base = OTHER; note = 2'-O-methyl ribonucleotide
  modified_base 46: mod_base = OTHER; note = 2'-O-methyl ribonucleotide
  modified_base 48: mod_base = OTHER; note = 2'-O-methyl ribonucleotide
  modified_base 50: mod_base = OTHER; note = 2'-O-methyl ribonucleotide
  modified_base 52: mod_base = OTHER; note = 2'-O-methyl ribonucleotide
  modified_base 53: mod_base = OTHER; note = 2'-O-methyl ribonucleotide
  modified_base 54: mod_base = OTHER; note = 2'-O-methyl ribonucleotide
  modified_base 57: mod_base = OTHER; note = 2'-O-methyl ribonucleotide
  modified_base 61: mod_base = OTHER; note = 2'-O-methyl ribonucleotide
  modified_base 66: mod_base = OTHER; note = 2'-O-methyl ribonucleotide
  modified_base 67: mod_base = OTHER; note = 2'-O-methyl ribonucleotide
  modified_base 70: mod_base = OTHER; note = 2'-O-methyl ribonucleotide
  modified_base 71: mod_base = OTHER; note = 2'-O-methyl ribonucleotide
  modified_base 72: mod_base = OTHER; note = 2'-O-methyl ribonucleotide
  modified_base 73: mod_base = OTHER; note = 2'-O-methyl ribonucleotide
  modified_base 74: mod_base = OTHER; note = 2'-O-methyl ribonucleotide
  modified_base 75: mod_base = OTHER; note = 2'-O-methyl ribonucleotide
  modified_base 76: mod_base = OTHER; note = 2'-O-methyl ribonucleotide
  modified_base 77: mod_base = OTHER; note = 2'-O-methyl ribonucleotide
  modified_base 78: mod_base = OTHER; note = 2'-O-methyl ribonucleotide
  modified_base 79: mod_base = OTHER; note = 2'-O-methyl ribonucleotide
  modified_base 80: mod_base = OTHER; note = 2'-O-methyl ribonucleotide
  modified_base 82: mod_base = OTHER; note = 2'-O-methyl ribonucleotide
  modified_base 83: mod_base = OTHER; note = 2'-O-methyl ribonucleotide
  modified_base 84: mod_base = OTHER; note = 2'-O-methyl ribonucleotide
  modified_base 85: mod_base = OTHER; note = 2'-O-methyl ribonucleotide
  modified_base 86: mod_base = OTHER; note = 2'-O-methyl ribonucleotide
  modified_base 87: mod_base = OTHER; note = 2'-O-methyl ribonucleotide
  modified_base 89: mod_base = OTHER; note = 2'-O-methyl ribonucleotide
  modified_base 91: mod_base = OTHER; note = 2'-O-methyl ribonucleotide
  modified_base 92: mod_base = OTHER; note = 2'-O-methyl ribonucleotide
  modified_base 93: mod_base = OTHER; note = 2'-O-methyl ribonucleotide
  modified_base 94: mod_base = OTHER; note = 2'-O-methyl ribonucleotide
  modified_base 95: mod_base = OTHER; note = 2'-O-methyl ribonucleotide
  modified_base 96: mod_base = OTHER; note = 2'-O-methyl ribonucleotide
  modified_base 97: mod_base = OTHER; note = 2'-O-methyl ribonucleotide
  modified_base 98: mod_base = OTHER; note = 2'-O-methyl ribonucleotide
  modified_base 99: mod_base = OTHER; note = 2'-O-methyl ribonucleotide
  modified_base 100: mod_base = OTHER; note = 2'-O-methyl ribonucleotide
  modified_base 101: mod_base = OTHER; note = uniform ribonucleotides (A, C, G, inosine or U), deoxynucleotides (A, G, C, inosine or T), ribonebularine, 2'-O-methylnebularine or deoxynebularine
  modified_base 102: mod_base = OTHER; note = uniform ribonucleotides (A, C, G, inosine or U), deoxynucleotides (A, G, C, inosine or T), ribonebularine, 2'-O-methylnebularine or deoxynebularine
  modified_base 103: mod_base = OTHER; note = uniform ribonucleotides (A, C, G, inosine or U), deoxynucleotides (A, G, C, inosine or T), ribonebularine, 2'-O-methylnebularine or deoxynebularine
  modified_base 1..4: mod_base = OTHER; note = phosphorothioate linkage
  modified_base 25..26: mod_base = OTHER; note = phosphorothioate linkage
  modified_base 98..100: mod_base = OTHER; note = phosphorothioate linkage
  misc_feature 1..100: note = RNA
  misc_feature 101..103: note = Optionally DNA or RNA

SEQ ID NO: 3018 - DNA, 103 bp, synthetic construct; identical to SEQ ID NO: 1797
  source 1..103: mol_type = other DNA
  modified_base 1: mod_base = OTHER; note = 2'-O-methyl ribonucleotide
  modified_base 2: mod_base = OTHER; note = 2'-O-methyl ribonucleotide
  modified_base 3: mod_base = OTHER; note = 2'-O-methyl ribonucleotide
  modified_base 21: mod_base = OTHER; note = 2'-O-methyl ribonucleotide
  modified_base 28: mod_base = OTHER; note = 2'-O-methyl ribonucleotide
  modified_base 29: mod_base = OTHER; note = 2'-O-methyl ribonucleotide
  modified_base 30: mod_base = OTHER; note = 2'-O-methyl ribonucleotide
  modified_base 31: mod_base = OTHER; note = 2'-O-methyl ribonucleotide
  modified_base 32: mod_base = OTHER; note = 2'-O-methyl ribonucleotide
  modified_base 34: mod_base = OTHER; note = 2'-O-methyl ribonucleotide
  modified_base 35: mod_base = OTHER; note = 2'-O-methyl ribonucleotide
  modified_base 36: mod_base = OTHER; note = 2'-O-methyl ribonucleotide
  modified_base 37: mod_base = OTHER; note = 2'-O-methyl ribonucleotide
  modified_base 38: mod_base = OTHER; note = 2'-O-methyl ribonucleotide
  modified_base 39: mod_base = OTHER; note = 2'-O-methyl ribonucleotide
  modified_base 40: mod_base = OTHER; note = 2'-O-methyl ribonucleotide
  modified_base 41: mod_base = OTHER; note = 2'-O-methyl ribonucleotide
  modified_base 42: mod_base = OTHER; note = 2'-O-methyl ribonucleotide
  modified_base 46: mod_base = OTHER; note = 2'-O-methyl ribonucleotide
  modified_base 48: mod_base = OTHER; note = 2'-O-methyl ribonucleotide
  modified_base 50: mod_base = OTHER; note = 2'-O-methyl ribonucleotide
  modified_base 52: mod_base = OTHER; note = 2'-O-methyl ribonucleotide
  modified_base 53: mod_base = OTHER; note = 2'-O-methyl ribonucleotide
  modified_base 54: mod_base = OTHER; note = 2'-O-methyl ribonucleotide
  modified_base 55: mod_base = OTHER; note = 2'-O-methyl ribonucleotide
  modified_base 56: mod_base = OTHER; note = 2'-O-methyl ribonucleotide
  modified_base 57: mod_base = OTHER; note = 2'-O-methyl ribonucleotide
  modified_base 60: mod_base = OTHER; note = 2'-O-methyl ribonucleotide
  modified_base 61: mod_base = OTHER; note = 2'-O-methyl ribonucleotide
  modified_base 66: mod_base = OTHER; note = 2'-O-methyl ribonucleotide
  modified_base 67: mod_base = OTHER; note = 2'-O-methyl ribonucleotide
  modified_base 70: mod_base = OTHER; note = 2'-O-methyl ribonucleotide
  modified_base 71: mod_base = OTHER; note = 2'-O-methyl ribonucleotide
  modified_base 72: mod_base = OTHER; note = 2'-O-methyl ribonucleotide
  modified_base 74: mod_base = OTHER; note = 2'-O-methyl ribonucleotide
  modified_base 75: mod_base = OTHER; note = 2'-O-methyl ribonucleotide
  modified_base 76: mod_base = OTHER; note = 2'-O-methyl ribonucleotide
  modified_base 77: mod_base = OTHER; note = 2'-O-methyl ribonucleotide
  modified_base 78: mod_base = OTHER; note = 2'-O-methyl ribonucleotide
  modified_base 79: mod_base = OTHER; note = 2'-O-methyl ribonucleotide
  modified_base 80: mod_base = OTHER; note = 2'-O-methyl ribonucleotide
  modified_base 82: mod_base = OTHER; note = 2'-O-methyl ribonucleotide
  modified_base 83: mod_base = OTHER; note = 2'-O-methyl ribonucleotide
  modified_base 84: mod_base = OTHER; note = 2'-O-methyl ribonucleotide
  modified_base 85: mod_base = OTHER; note = 2'-O-methyl ribonucleotide
  modified_base 86: mod_base = OTHER; note = 2'-O-methyl ribonucleotide
  modified_base 87: mod_base = OTHER; note = 2'-O-methyl ribonucleotide
  modified_base 89: mod_base = OTHER; note = 2'-O-methyl ribonucleotide
  modified_base 92: mod_base = OTHER; note = 2'-O-methyl ribonucleotide
  modified_base 93: mod_base = OTHER; note = 2'-O-methyl ribonucleotide
  modified_base 94: mod_base = OTHER; note = 2'-O-methyl ribonucleotide
  modified_base 95: mod_base = OTHER; note = 2'-O-methyl ribonucleotide
  modified_base 96: mod_base = OTHER; note = 2'-O-methyl ribonucleotide
  modified_base 97: mod_base = OTHER; note = 2'-O-methyl ribonucleotide
  modified_base 98: mod_base = OTHER; note = 2'-O-methyl ribonucleotide
  modified_base 99: mod_base = OTHER; note = 2'-O-methyl ribonucleotide
  modified_base 100: mod_base = OTHER; note = 2'-O-methyl ribonucleotide
  modified_base 101: mod_base = OTHER; note = uniform ribonucleotides (A, C, G, inosine or U), deoxynucleotides (A, G, C, inosine or T), ribonebularine, 2'-O-methylnebularine or deoxynebularine
  modified_base 102: mod_base = OTHER; note = uniform ribonucleotides (A, C, G, inosine or U), deoxynucleotides (A, G, C, inosine or T), ribonebularine, 2'-O-methylnebularine or deoxynebularine
  modified_base 103: mod_base = OTHER; note = uniform ribonucleotides (A, C, G, inosine or U), deoxynucleotides (A, G, C, inosine or T), ribonebularine, 2'-O-methylnebularine or deoxynebularine
  modified_base 1..4: mod_base = OTHER; note = phosphorothioate linkage
  modified_base 25..26: mod_base = OTHER; note = phosphorothioate linkage
  modified_base 98..100: mod_base = OTHER; note = phosphorothioate linkage
  misc_feature 1..100: note = RNA
  misc_feature 101..103: note = Optionally DNA or RNA

SEQ ID NO: 3019 - DNA, 103 bp, synthetic construct; identical to SEQ ID NO: 1795
  source 1..103: mol_type = other DNA
  modified_base 1: mod_base = OTHER; note = 2'-O-methyl ribonucleotide
  modified_base 2: mod_base = OTHER; note = 2'-O-methyl ribonucleotide
  modified_base 3: mod_base = OTHER; note = 2'-O-methyl ribonucleotide
  modified_base 21: mod_base = OTHER; note = 2'-O-methyl ribonucleotide
  modified_base 28: mod_base = OTHER; note = 2'-O-methyl ribonucleotide
  modified_base 29: mod_base = OTHER; note = 2'-O-methyl ribonucleotide
  modified_base 30: mod_base = OTHER; note = 2'-O-methyl ribonucleotide
  modified_base 31: mod_base = OTHER; note = 2'-O-methyl ribonucleotide
  modified_base 32: mod_base = OTHER; note = 2'-O-methyl ribonucleotide
  modified_base 33: mod_base = OTHER; note = 2'-O-methyl ribonucleotide
  modified_base 34: mod_base = OTHER; note = 2'-O-methyl ribonucleotide
  modified_base 35: mod_base = OTHER; note = 2'-O-methyl ribonucleotide
  modified_base 36: mod_base = OTHER; note = 2'-O-methyl ribonucleotide
  modified_base 37: mod_base = OTHER; note = 2'-O-methyl ribonucleotide
  modified_base 38: mod_base = OTHER; note = 2'-O-methyl ribonucleotide
  modified_base 39: mod_base = OTHER; note = 2'-O-methyl ribonucleotide
  modified_base 40: mod_base = OTHER; note = 2'-O-methyl ribonucleotide
  modified_base 41: mod_base = OTHER; note = 2'-O-methyl ribonucleotide
  modified_base 42: mod_base = OTHER; note = 2'-O-methyl ribonucleotide
  modified_base 46: mod_base = OTHER; note = 2'-O-methyl ribonucleotide
  modified_base 48: mod_base = OTHER; note = 2'-O-methyl ribonucleotide
  modified_base 50: mod_base = OTHER; note = 2'-O-methyl ribonucleotide
  modified_base 52: mod_base = OTHER; note = 2'-O-methyl ribonucleotide
  modified_base 53: mod_base = OTHER; note = 2'-O-methyl ribonucleotide
  modified_base 54: mod_base = OTHER; note = 2'-O-methyl ribonucleotide
  modified_base 55: mod_base = OTHER; note = 2'-O-methyl ribonucleotide
  modified_base 56: mod_base = OTHER; note = 2'-O-methyl ribonucleotide
  modified_base 57: mod_base = OTHER; note = 2'-O-methyl ribonucleotide
  modified_base 60: mod_base = OTHER; note = 2'-O-methyl ribonucleotide
  modified_base 61: mod_base = OTHER; note = 2'-O-methyl ribonucleotide
  modified_base 66: mod_base = OTHER; note = 2'-O-methyl ribonucleotide
  modified_base 67: mod_base = OTHER; note = 2'-O-methyl ribonucleotide
  modified_base 70: mod_base = OTHER; note = 2'-O-methyl ribonucleotide
  modified_base 71: mod_base = OTHER; note = 2'-O-methyl ribonucleotide
  modified_base 72: mod_base = OTHER; note = 2'-O-methyl ribonucleotide
  modified_base 73: mod_base = OTHER; note = 2'-O-methyl ribonucleotide
  modified_base 74: mod_base = OTHER; note = 2'-O-methyl ribonucleotide
  modified_base 75: mod_base = OTHER; note = 2'-O-methyl ribonucleotide
  modified_base 76: mod_base = OTHER; note = 2'-O-methyl ribonucleotide
  modified_base 77: mod_base = OTHER; note = 2'-O-methyl ribonucleotide
  modified_base 78: mod_base = OTHER; note = 2'-O-methyl ribonucleotide
  modified_base 79: mod_base = OTHER; note = 2'-O-methyl ribonucleotide
  modified_base 80: mod_base = OTHER; note = 2'-O-methyl ribonucleotide
  modified_base 81: mod_base = OTHER; note = 2'-O-methyl ribonucleotide
  modified_base 83: mod_base = OTHER; note = 2'-O-methyl ribonucleotide
  modified_base 84: mod_base = OTHER; note = 2'-O-methyl ribonucleotide
  modified_base 85: mod_base = OTHER; note = 2'-O-methyl ribonucleotide
  modified_base 86: mod_base = OTHER; note = 2'-O-methyl ribonucleotide
  modified_base 87: mod_base = OTHER; note = 2'-O-methyl ribonucleotide
  modified_base 88: mod_base = OTHER; note = 2'-O-methyl ribonucleotide
  modified_base 89: mod_base = OTHER; note = 2'-O-methyl ribonucleotide
  modified_base 90: mod_base = OTHER; note = 2'-O-methyl ribonucleotide
  modified_base 91: mod_base = OTHER; note = 2'-O-methyl ribonucleotide
  modified_base 92: mod_base = OTHER; note = 2'-O-methyl ribonucleotide
  modified_base 93: mod_base = OTHER; note = 2'-O-methyl ribonucleotide
  modified_base 94: mod_base = OTHER; note = 2'-O-methyl ribonucleotide
  modified_base 95: mod_base = OTHER; note = 2'-O-methyl ribonucleotide
  modified_base 96: mod_base = OTHER; note = 2'-O-methyl ribonucleotide
  modified_base 97: mod_base = OTHER; note = 2'-O-methyl ribonucleotide
  modified_base 98: mod_base = OTHER; note = 2'-O-methyl ribonucleotide
  modified_base 99: mod_base = OTHER; note = 2'-O-methyl ribonucleotide
  modified_base 100: mod_base = OTHER; note = 2'-O-methyl ribonucleotide
  modified_base 101: mod_base = OTHER; note = uniform ribonucleotides (A, C, G, inosine or U), deoxynucleotides (A, G, C, inosine or T), ribonebularine, 2'-O-methylnebularine or deoxynebularine
  modified_base 102: mod_base = OTHER; note = uniform ribonucleotides (A, C, G, inosine or U), deoxynucleotides (A, G, C, inosine or T), ribonebularine, 2'-O-methylnebularine or deoxynebularine
  modified_base 103: mod_base = OTHER; note = uniform ribonucleotides (A, C, G, inosine or U), deoxynucleotides (A, G, C, inosine or T), ribonebularine, 2'-O-methylnebularine or deoxynebularine
  modified_base 1..4: mod_base = OTHER; note = phosphorothioate linkage
  modified_base 45..46: mod_base = OTHER; note = phosphorothioate linkage
  modified_base 64..65: mod_base = OTHER; note = phosphorothioate linkage
  modified_base 98..100: mod_base = OTHER; note = phosphorothioate linkage
  misc_feature 1..100: note = RNA
  misc_feature 101..103: note = Optionally DNA or RNA

SEQ ID NO: 3020 - DNA, 103 bp, synthetic construct; identical to SEQ ID NO: 1795
  source 1..103: mol_type = other DNA
  modified_base 1: mod_base = OTHER; note = 2'-O-methyl ribonucleotide
  modified_base 2: mod_base = OTHER; note = 2'-O-methyl ribonucleotide
  modified_base 3: mod_base = OTHER; note = 2'-O-methyl ribonucleotide
  modified_base 21: mod_base = OTHER; note = 2'-O-methyl ribonucleotide
  modified_base 28: mod_base = OTHER; note = 2'-O-methyl ribonucleotide
  modified_base 29: mod_base = OTHER; note = 2'-O-methyl ribonucleotide
  modified_base 30: mod_base = OTHER; note = 2'-O-methyl ribonucleotide
  modified_base 31: mod_base = OTHER; note = 2'-O-methyl ribonucleotide
  modified_base 32: mod_base = OTHER; note = 2'-O-methyl ribonucleotide
  modified_base 34: mod_base = OTHER; note = 2'-O-methyl ribonucleotide
  modified_base 35: mod_base = OTHER; note = 2'-O-methyl ribonucleotide
  modified_base 36: mod_base = OTHER; note = 2'-O-methyl ribonucleotide
  modified_base 37: mod_base = OTHER; note = 2'-O-methyl ribonucleotide
  modified_base 38: mod_base = OTHER; note = 2'-O-methyl ribonucleotide
  modified_base 39: mod_base = OTHER; note = 2'-O-methyl ribonucleotide
  modified_base 40: mod_base = OTHER; note = 2'-O-methyl ribonucleotide
  modified_base 41: mod_base = OTHER; note = 2'-O-methyl ribonucleotide
  modified_base 42: mod_base = OTHER; note = 2'-O-methyl ribonucleotide
  modified_base 46: mod_base = OTHER; note = 2'-O-methyl ribonucleotide
  modified_base 48: mod_base = OTHER; note = 2'-O-methyl ribonucleotide
  modified_base 50: mod_base = OTHER; note = 2'-O-methyl ribonucleotide
  modified_base 52: mod_base = OTHER; note = 2'-O-methyl ribonucleotide
  modified_base 53: mod_base = OTHER; note = 2'-O-methyl ribonucleotide
  modified_base 54: mod_base = OTHER; note = 2'-O-methyl ribonucleotide
  modified_base 55: mod_base = OTHER; note = 2'-O-methyl ribonucleotide
  modified_base 56: mod_base = OTHER; note = 2'-O-methyl ribonucleotide
  modified_base 57: mod_base = OTHER; note = 2'-O-methyl ribonucleotide
  modified_base 60: mod_base = OTHER; note = 2'-O-methyl ribonucleotide
  modified_base 61: mod_base = OTHER; note = 2'-O-methyl ribonucleotide
  modified_base 66: mod_base = OTHER; note = 2'-O-methyl ribonucleotide
  modified_base 67: mod_base = OTHER; note = 2'-O-methyl ribonucleotide
  modified_base 70: mod_base = OTHER; note = 2'-O-methyl ribonucleotide
  modified_base 71: mod_base = OTHER; note = 2'-O-methyl ribonucleotide
  modified_base 72: mod_base = OTHER; note = 2'-O-methyl ribonucleotide
  modified_base 74: mod_base = OTHER; note = 2'-O-methyl ribonucleotide
  modified_base 75: mod_base = OTHER; note = 2'-O-methyl ribonucleotide
  modified_base 76: mod_base = OTHER; note = 2'-O-methyl ribonucleotide
  modified_base 77: mod_base = OTHER; note = 2'-O-methyl ribonucleotide
  modified_base 78: mod_base = OTHER; note = 2'-O-methyl ribonucleotide
  modified_base 79: mod_base = OTHER; note = 2'-O-methyl ribonucleotide
  modified_base 80: mod_base = OTHER; note = 2'-O-methyl ribonucleotide
  modified_base 81: mod_base = OTHER; note = 2'-O-methyl ribonucleotide
  modified_base 83: mod_base = OTHER; note = 2'-O-methyl ribonucleotide
  modified_base 84: mod_base = OTHER; note = 2'-O-methyl ribonucleotide
  modified_base 85: mod_base = OTHER; note = 2'-O-methyl ribonucleotide
  modified_base 86: mod_base = OTHER; note = 2'-O-methyl ribonucleotide
  modified_base 87: mod_base = OTHER; note = 2'-O-methyl ribonucleotide
  modified_base 88: mod_base = OTHER; note = 2'-O-methyl ribonucleotide
  modified_base 89: mod_base = OTHER; note = 2'-O-methyl ribonucleotide
  modified_base 90: mod_base = OTHER; note = 2'-O-methyl ribonucleotide
  modified_base 91: mod_base = OTHER; note = 2'-O-methyl ribonucleotide
  modified_base 92: mod_base = OTHER; note = 2'-O-methyl ribonucleotide
  modified_base 93: mod_base = OTHER; note = 2'-O-methyl ribonucleotide
  modified_base 94: mod_base = OTHER; note = 2'-O-methyl ribonucleotide
  modified_base 95: mod_base = OTHER; note = 2'-O-methyl ribonucleotide
  modified_base 96: mod_base = OTHER; note = 2'-O-methyl ribonucleotide
  modified_base 97: mod_base = OTHER; note = 2'-O-methyl ribonucleotide
  modified_base 98: mod_base = OTHER; note = 2'-O-methyl ribonucleotide
  modified_base 99: mod_base = OTHER; note = 2'-O-methyl ribonucleotide
  modified_base 100: mod_base = OTHER; note = 2'-O-methyl ribonucleotide
  modified_base 101: mod_base = OTHER; note = uniform ribonucleotides (A, C, G, inosine or U), deoxynucleotides (A, G, C, inosine or T), ribonebularine, 2'-O-methylnebularine or deoxynebularine
  modified_base 102: mod_base = OTHER; note = uniform ribonucleotides (A, C, G, inosine or U), deoxynucleotides (A, G, C, inosine or T), ribonebularine, 2'-O-methylnebularine or deoxynebularine
  modified_base 103: mod_base = OTHER; note = uniform ribonucleotides (A, C, G, inosine or U), deoxynucleotides (A, G, C, inosine or T), ribonebularine, 2'-O-methylnebularine or deoxynebularine
  modified_base 1..4: mod_base = OTHER; note = phosphorothioate linkage
  modified_base 45..46: mod_base = OTHER; note = phosphorothioate linkage
  modified_base 64..65: mod_base = OTHER; note = phosphorothioate linkage
  modified_base 98..100: mod_base = OTHER; note = phosphorothioate linkage
  misc_feature 1..100: note = RNA
  misc_feature 101..103: note = Optionally DNA or RNA

SEQ ID NO: 3021 - DNA, 103 bp, synthetic construct; identical to SEQ ID NO: 1796
  source 1..103: mol_type = other DNA
  modified_base 1: mod_base = OTHER; note = 2'-O-methyl ribonucleotide
  modified_base 2: mod_base = OTHER; note = 2'-O-methyl ribonucleotide
  modified_base 3: mod_base = OTHER; note = 2'-O-methyl ribonucleotide
  modified_base 21: mod_base = OTHER; note = 2'-O-methyl ribonucleotide
  modified_base 28: mod_base = OTHER; note = 2'-O-methyl ribonucleotide
  modified_base 29: mod_base = OTHER; note = 2'-O-methyl ribonucleotide
  modified_base 30: mod_base = OTHER; note = 2'-O-methyl ribonucleotide
  modified_base 31: mod_base = OTHER; note = 2'-O-methyl ribonucleotide
  modified_base 32: mod_base = OTHER; note = 2'-O-methyl ribonucleotide
  modified_base 33: mod_base = OTHER; note = 2'-O-methyl ribonucleotide
  modified_base 34: mod_base = OTHER; note = 2'-O-methyl ribonucleotide
  modified_base 35: mod_base = OTHER; note = 2'-O-methyl ribonucleotide
  modified_base 36: mod_base = OTHER; note = 2'-O-methyl ribonucleotide
  modified_base 37: mod_base = OTHER; note = 2'-O-methyl ribonucleotide
  modified_base 38: mod_base = OTHER; note = 2'-O-methyl ribonucleotide
  modified_base 39: mod_base = OTHER; note = 2'-O-methyl ribonucleotide
  modified_base 40: mod_base = OTHER; note = 2'-O-methyl ribonucleotide
  modified_base 41: mod_base = OTHER; note = 2'-O-methyl ribonucleotide
  modified_base 42: mod_base = OTHER; note = 2'-O-methyl ribonucleotide
  modified_base 46: mod_base = OTHER; note = 2'-O-methyl ribonucleotide
  modified_base 48: mod_base = OTHER; note = 2'-O-methyl ribonucleotide
  modified_base 50: mod_base = OTHER; note = 2'-O-methyl ribonucleotide
  modified_base 52: mod_base = OTHER; note = 2'-O-methyl ribonucleotide
  modified_base 53: mod_base = OTHER; note = 2'-O-methyl ribonucleotide
  modified_base 54: mod_base = OTHER; note = 2'-O-methyl ribonucleotide
  modified_base 55: mod_base = OTHER; note = 2'-O-methyl ribonucleotide
  modified_base 56: mod_base = OTHER; note = 2'-O-methyl ribonucleotide
  modified_base 57: mod_base = OTHER; note = 2'-O-methyl ribonucleotide
  modified_base 60: mod_base = OTHER; note = 2'-O-methyl ribonucleotide
  modified_base 61: mod_base = OTHER; note = 2'-O-methyl ribonucleotide
  modified_base 66: mod_base = OTHER; note = 2'-O-methyl ribonucleotide
  modified_base 67: mod_base = OTHER; note = 2'-O-methyl ribonucleotide
  modified_base 70: mod_base = OTHER; note = 2'-O-methyl ribonucleotide
  modified_base 71: mod_base = OTHER; note = 2'-O-methyl ribonucleotide
  modified_base 72: mod_base = OTHER; note = 2'-O-methyl ribonucleotide
  modified_base 73: mod_base = OTHER; note = 2'-O-methyl ribonucleotide
  modified_base 74: mod_base = OTHER; note = 2'-O-methyl ribonucleotide
  modified_base 75: mod_base = OTHER; note = 2'-O-methyl ribonucleotide
  modified_base 76: mod_base = OTHER; note = 2'-O-methyl ribonucleotide
  modified_base 77: mod_base = OTHER; note = 2'-O-methyl ribonucleotide
  modified_base 78: mod_base = OTHER; note = 2'-O-methyl ribonucleotide
  modified_base 79: mod_base = OTHER; note = 2'-O-methyl ribonucleotide
  modified_base 80: mod_base = OTHER; note = 2'-O-methyl ribonucleotide
  modified_base 81: mod_base = OTHER; note = 2'-O-methyl ribonucleotide
  modified_base 83: mod_base = OTHER; note = 2'-O-methyl ribonucleotide
  modified_base 84: mod_base = OTHER; note = 2'-O-methyl ribonucleotide
  modified_base 85: mod_base = OTHER; note = 2'-O-methyl ribonucleotide
  modified_base 86: mod_base = OTHER; note = 2'-O-methyl ribonucleotide
  modified_base 87: mod_base = OTHER; note = 2'-O-methyl ribonucleotide
  modified_base 88: mod_base = OTHER; note = 2'-O-methyl ribonucleotide
  modified_base 89: mod_base = OTHER; note = 2'-O-methyl ribonucleotide
  modified_base 90: mod_base = OTHER; note = 2'-O-methyl ribonucleotide
  modified_base 91: mod_base = OTHER; note = 2'-O-methyl ribonucleotide
  modified_base 92: mod_base = OTHER; note = 2'-O-methyl ribonucleotide
  modified_base 93: mod_base = OTHER; note = 2'-O-methyl ribonucleotide
  modified_base 94: mod_base = OTHER; note = 2'-O-methyl ribonucleotide
  modified_base 95: mod_base = OTHER; note = 2'-O-methyl ribonucleotide
  modified_base 96: mod_base = OTHER; note = 2'-O-methyl ribonucleotide
  modified_base 97: mod_base = OTHER; note = 2'-O-methyl ribonucleotide
  modified_base 98: mod_base = OTHER; note = 2'-O-methyl ribonucleotide
  modified_base 99: mod_base = OTHER; note = 2'-O-methyl ribonucleotide
  modified_base 100: mod_base = OTHER; note = 2'-O-methyl ribonucleotide
  modified_base 101: mod_base = OTHER; note = uniform ribonucleotides (A, C, G, inosine or U), deoxynucleotides (A, G, C, inosine or T), ribonebularine, 2'-O-methylnebularine or deoxynebularine
  modified_base 102: mod_base = OTHER; note = uniform ribonucleotides (A, C, G, inosine or U), deoxynucleotides (A, G, C, inosine or T), ribonebularine, 2'-O-methylnebularine or deoxynebularine
  modified_base 103: mod_base = OTHER; note = uniform ribonucleotides (A, C, G, inosine or U), deoxynucleotides (A, G, C, inosine or T), ribonebularine, 2'-O-methylnebularine or deoxynebularine
  modified_base 1..4: mod_base = OTHER; note = phosphorothioate linkage
  modified_base 45..46: mod_base = OTHER; note = phosphorothioate linkage
  modified_base 64..65: mod_base = OTHER; note = phosphorothioate linkage
  modified_base 98..100: mod_base = OTHER; note = phosphorothioate linkage
  misc_feature 1..100: note = RNA
  misc_feature 101..103: note = Optionally DNA or RNA

SEQ ID NO: 3022 - DNA, 103 bp, synthetic construct; identical to SEQ ID NO: 1796
  source 1..103: mol_type = other DNA
  modified_base 1: mod_base = OTHER; note = 2'-O-methyl ribonucleotide
  modified_base 2: mod_base = OTHER; note = 2'-O-methyl ribonucleotide
  modified_base 3: mod_base = OTHER; note = 2'-O-methyl ribonucleotide
  modified_base 21: mod_base = OTHER; note = 2'-O-methyl ribonucleotide
  modified_base 28: mod_base = OTHER; note = 2'-O-methyl ribonucleotide
  modified_base 29: mod_base = OTHER; note = 2'-O-methyl ribonucleotide
  modified_base 30: mod_base = OTHER; note = 2'-O-methyl ribonucleotide
  modified_base 31: mod_base = OTHER; note = 2'-O-methyl ribonucleotide
  modified_base 32: mod_base = OTHER; note = 2'-O-methyl ribonucleotide
  modified_base 34: mod_base = OTHER; note = 2'-O-methyl ribonucleotide
  modified_base 35: mod_base = OTHER; note = 2'-O-methyl ribonucleotide
  modified_base 36: mod_base = OTHER; note = 2'-O-methyl ribonucleotide
  modified_base 37: mod_base = OTHER; note = 2'-O-methyl ribonucleotide
  modified_base 38: mod_base = OTHER; note = 2'-O-methyl ribonucleotide
  modified_base 39: mod_base = OTHER; note = 2'-O-methyl ribonucleotide
  modified_base 40: mod_base = OTHER; note = 2'-O-methyl ribonucleotide
  modified_base 41: mod_base = OTHER; note = 2'-O-methyl ribonucleotide
  modified_base 42: mod_base = OTHER; note = 2'-O-methyl ribonucleotide
  modified_base 46: mod_base = OTHER; note = 2'-O-methyl ribonucleotide
  modified_base 48: mod_base = OTHER; note = 2'-O-methyl ribonucleotide
  modified_base 50: mod_base = OTHER; note = 2'-O-methyl ribonucleotide
  modified_base 52: mod_base = OTHER; note = 2'-O-methyl ribonucleotide
  modified_base 53: mod_base = OTHER; note = 2'-O-methyl ribonucleotide
  modified_base 54: mod_base = OTHER; note = 2'-O-methyl ribonucleotide
  modified_base 55: mod_base = OTHER; note = 2'-O-methyl ribonucleotide
  modified_base 56: mod_base = OTHER; note = 2'-O-methyl ribonucleotide
  modified_base 57: mod_base = OTHER; note = 2'-O-methyl ribonucleotide
  modified_base 60: mod_base = OTHER; note = 2'-O-methyl ribonucleotide
  modified_base 61: mod_base = OTHER; note = 2'-O-methyl ribonucleotide
  modified_base 66: mod_base = OTHER; note = 2'-O-methyl ribonucleotide
  modified_base 67: mod_base = OTHER; note = 2'-O-methyl ribonucleotide
  modified_base 70: mod_base = OTHER; note = 2'-O-methyl ribonucleotide
  modified_base 71: mod_base = OTHER; note = 2'-O-methyl ribonucleotide
  modified_base 72: mod_base = OTHER; note = 2'-O-methyl ribonucleotide
  modified_base 74: mod_base = OTHER; note = 2'-O-methyl ribonucleotide
  modified_base 75: mod_base = OTHER; note = 2'-O-methyl ribonucleotide
  modified_base 76: mod_base = OTHER; note = 2'-O-methyl ribonucleotide
  modified_base 77: mod_base = OTHER; note = 2'-O-methyl ribonucleotide
  modified_base 78: mod_base = OTHER; note = 2'-O-methyl ribonucleotide
  modified_base 79: mod_base = OTHER; note = 2'-O-methyl ribonucleotide
  modified_base 80: mod_base = OTHER; note = 2'-O-methyl ribonucleotide
  modified_base 81: mod_base = OTHER; note = 2'-O-methyl ribonucleotide
  modified_base 83: mod_base = OTHER; note = 2'-O-methyl ribonucleotide
  modified_base 84: mod_base = OTHER; note = 2'-O-methyl ribonucleotide
  modified_base 85: mod_base = OTHER; note = 2'-O-methyl ribonucleotide
  modified_base 86: mod_base = OTHER; note = 2'-O-methyl ribonucleotide
  modified_base 87: mod_base = OTHER; note = 2'-O-methyl ribonucleotide
  modified_base 88: mod_base = OTHER; note = 2'-O-methyl ribonucleotide
  modified_base 89: mod_base = OTHER; note = 2'-O-methyl ribonucleotide
  modified_base 90: mod_base = OTHER; note = 2'-O-methyl ribonucleotide
  modified_base 91: mod_base = OTHER; note = 2'-O-methyl ribonucleotide
  modified_base 92: mod_base = OTHER; note = 2'-O-methyl ribonucleotide
  modified_base 93: mod_base = OTHER; note = 2'-O-methyl ribonucleotide
  modified_base 94: mod_base = OTHER; note = 2'-O-methyl ribonucleotide
  modified_base 95: mod_base = OTHER; note = 2'-O-methyl ribonucleotide
  modified_base 96: mod_base = OTHER; note = 2'-O-methyl ribonucleotide
  modified_base 97: mod_base = OTHER; note = 2'-O-methyl ribonucleotide
  modified_base 98: mod_base = OTHER; note = 2'-O-methyl ribonucleotide
  modified_base 99: mod_base = OTHER; note = 2'-O-methyl ribonucleotide
  modified_base 100: mod_base = OTHER; note = 2'-O-methyl ribonucleotide
  modified_base 101: mod_base = OTHER; note = uniform ribonucleotides (A, C, G, inosine or U), deoxynucleotides (A, G, C, inosine or T), ribonebularine, 2'-O-methylnebularine or deoxynebularine
  modified_base 102: mod_base = OTHER; note = uniform ribonucleotides (A, C, G, inosine or U), deoxynucleotides (A, G, C, inosine or T), ribonebularine, 2'-O-methylnebularine or deoxynebularine
  modified_base 103: mod_base = OTHER; note = uniform ribonucleotides (A, C, G, inosine or U), deoxynucleotides (A, G, C, inosine or T), ribonebularine, 2'-O-methylnebularine or deoxynebularine
  modified_base 1..4: mod_base = OTHER; note = phosphorothioate linkage
  modified_base 45..46: mod_base = OTHER; note = phosphorothioate linkage
  modified_base 64..65: mod_base = OTHER; note = phosphorothioate linkage
  modified_base 98..100: mod_base = OTHER; note = phosphorothioate linkage
  misc_feature 1..100: note = RNA
  misc_feature 101..103: note = Optionally DNA or RNA

SEQ ID NO: 3023 - DNA, 103 bp, synthetic construct; identical to SEQ ID NO: 1797
  source 1..103: mol_type = other DNA
  modified_base 1: mod_base = OTHER; note = 2'-O-methyl ribonucleotide
  modified_base 2: mod_base = OTHER; note = 2'-O-methyl ribonucleotide
  modified_base 3: mod_base = OTHER; note = 2'-O-methyl ribonucleotide
  modified_base 21: mod_base = OTHER; note = 2'-O-methyl ribonucleotide
  modified_base 28: mod_base = OTHER; note = 2'-O-methyl ribonucleotide
  modified_base 29: mod_base = OTHER; note = 2'-O-methyl ribonucleotide
  modified_base 30: mod_base = OTHER; note = 2'-O-methyl ribonucleotide
  modified_base 31: mod_base = OTHER; note = 2'-O-methyl ribonucleotide
  modified_base 32: mod_base = OTHER; note = 2'-O-methyl ribonucleotide
  modified_base 33: mod_base = OTHER; note = 2'-O-methyl ribonucleotide
  modified_base 34: mod_base = OTHER; note = 2'-O-methyl ribonucleotide
  modified_base 35: mod_base = OTHER; note = 2'-O-methyl ribonucleotide
  modified_base 36: mod_base = OTHER; note = 2'-O-methyl ribonucleotide
  modified_base 37: mod_base = OTHER; note = 2'-O-methyl ribonucleotide
  modified_base 38: mod_base = OTHER; note = 2'-O-methyl ribonucleotide
  modified_base 39: mod_base = OTHER; note = 2'-O-methyl ribonucleotide
  modified_base 40: mod_base = OTHER; note = 2'-O-methyl ribonucleotide
  modified_base 41: mod_base = OTHER; note = 2'-O-methyl ribonucleotide
  modified_base 42: mod_base = OTHER; note = 2'-O-methyl ribonucleotide
  modified_base 46: mod_base = OTHER; note = 2'-O-methyl ribonucleotide
  modified_base 48: mod_base = OTHER; note = 2'-O-methyl ribonucleotide
  modified_base 50: mod_base = OTHER; note = 2'-O-methyl ribonucleotide
  modified_base 52: mod_base = OTHER; note = 2'-O-methyl ribonucleotide
  modified_base 53: mod_base = OTHER; note = 2'-O-methyl ribonucleotide
  modified_base 54: mod_base = OTHER; note = 2'-O-methyl ribonucleotide
  modified_base 57: mod_base = OTHER; note = 2'-O-methyl ribonucleotide
  modified_base 61: mod_base = OTHER; note = 2'-O-methyl ribonucleotide
  modified_base 66: mod_base = OTHER; note = 2'-O-methyl ribonucleotide
  modified_base 67: mod_base = OTHER; note = 2'-O-methyl ribonucleotide
  modified_base 70: mod_base = OTHER; note = 2'-O-methyl ribonucleotide
  modified_base 71: mod_base = OTHER; note = 2'-O-methyl ribonucleotide
  modified_base 72: mod_base = OTHER; note = 2'-O-methyl ribonucleotide
  modified_base 74: mod_base = OTHER; note = 2'-O-methyl ribonucleotide
  modified_base 75: mod_base = OTHER; note = 2'-O-methyl ribonucleotide
  modified_base 76: mod_base = OTHER; note = 2'-O-methyl ribonucleotide
  modified_base 77: mod_base = OTHER; note = 2'-O-methyl ribonucleotide
  modified_base 78: mod_base = OTHER; note = 2'-O-methyl ribonucleotide
  modified_base 79: mod_base = OTHER; note = 2'-O-methyl ribonucleotide
  modified_base 80: mod_base = OTHER; note = 2'-O-methyl ribonucleotide
  modified_base 82: mod_base = OTHER; note = 2'-O-methyl ribonucleotide
  modified_base 83: mod_base = OTHER; note = 2'-O-methyl ribonucleotide
  modified_base 84: mod_base = OTHER; note = 2'-O-methyl ribonucleotide
  modified_base 85: mod_base = OTHER; note = 2'-O-methyl ribonucleotide
  modified_base 86: mod_base = OTHER; note = 2'-O-methyl ribonucleotide
  modified_base 87: mod_base = OTHER; note = 2'-O-methyl ribonucleotide
  modified_base 89: mod_base = OTHER; note = 2'-O-methyl ribonucleotide
  modified_base 92: mod_base = OTHER; note = 2'-O-methyl ribonucleotide
  modified_base 93: mod_base = OTHER; note = 2'-O-methyl ribonucleotide
  modified_base 94: mod_base = OTHER; note = 2'-O-methyl ribonucleotide
  modified_base 95: mod_base = OTHER; note = 2'-O-methyl ribonucleotide
  modified_base 96: mod_base = OTHER; note = 2'-O-methyl ribonucleotide
  modified_base 97: mod_base = OTHER; note = 2'-O-methyl ribonucleotide
  modified_base 98: mod_base = OTHER; note = 2'-O-methyl ribonucleotide
  modified_base 99: mod_base = OTHER; note = 2'-O-methyl ribonucleotide
  modified_base 100: mod_base = OTHER; note = 2'-O-methyl ribonucleotide
  modified_base 101: mod_base = OTHER; note = uniform ribonucleotides (A, C, G, inosine or U), deoxynucleotides (A, G, C, inosine or T), ribonebularine, 2'-O-methylnebularine or deoxynebularine
  modified_base 102: mod_base = OTHER; note = uniform ribonucleotides (A, C, G, inosine or U), deoxynucleotides (A, G, C, inosine or T), ribonebularine, 2'-O-methylnebularine or deoxynebularine
  modified_base 103: mod_base = OTHER; note = uniform ribonucleotides (A, C, G, inosine or U), deoxynucleotides (A, G, C, inosine or T), ribonebularine, 2'-O-methylnebularine or deoxynebularine
  modified_base 1..4: mod_base = OTHER; note = phosphorothioate linkage
  modified_base 45..46: mod_base = OTHER; note = phosphorothioate linkage
  modified_base 64..65: mod_base = OTHER; note = phosphorothioate linkage
  modified_base 98..100: mod_base = OTHER; note = phosphorothioate linkage
  misc_feature 1..100: note = RNA
  misc_feature 101..103: note = Optionally DNA or RNA

SEQ ID NO: 3024 - DNA, 103 bp, synthetic construct; identical to SEQ ID NO: 1797
  source 1..103: mol_type = other DNA
  modified_base 1: mod_base = OTHER; note = 2'-O-methyl ribonucleotide
  modified_base 2: mod_base = OTHER; note = 2'-O-methyl ribonucleotide
  modified_base 3: mod_base = OTHER; note = 2'-O-methyl ribonucleotide
  modified_base 21: mod_base = OTHER; note = 2'-O-methyl ribonucleotide
  modified_base 28: mod_base = OTHER; note = 2'-O-methyl ribonucleotide
  modified_base 29: mod_base = OTHER; note = 2'-O-methyl ribonucleotide
  modified_base 30: mod_base = OTHER; note = 2'-O-methyl ribonucleotide
  modified_base 31: mod_base = OTHER; note = 2'-O-methyl ribonucleotide
  modified_base 32: mod_base = OTHER; note = 2'-O-methyl ribonucleotide
  modified_base 33: mod_base = OTHER; note = 2'-O-methyl ribonucleotide
  modified_base 34: mod_base = OTHER; note = 2'-O-methyl ribonucleotide
  modified_base 35: mod_base = OTHER; note = 2'-O-methyl ribonucleotide
  modified_base 36: mod_base = OTHER; note = 2'-O-methyl ribonucleotide
  modified_base 37: mod_base = OTHER; note = 2'-O-methyl ribonucleotide
  modified_base 38: mod_base = OTHER; note = 2'-O-methyl ribonucleotide
  modified_base 39: mod_base = OTHER; note = 2'-O-methyl ribonucleotide
  modified_base 40: mod_base = OTHER; note = 2'-O-methyl ribonucleotide
  modified_base 41: mod_base = OTHER; note = 2'-O-methyl ribonucleotide
  modified_base 42: mod_base = OTHER; note = 2'-O-methyl ribonucleotide
  modified_base 46: mod_base = OTHER; note = 2'-O-methyl ribonucleotide
  modified_base 48: mod_base = OTHER; note = 2'-O-methyl ribonucleotide
  modified_base 50: mod_base = OTHER; note = 2'-O-methyl ribonucleotide
  modified_base 52: mod_base = OTHER; note = 2'-O-methyl ribonucleotide
  modified_base 53: mod_base = OTHER; note = 2'-O-methyl ribonucleotide
  modified_base 54: mod_base = OTHER; note = 2'-O-methyl ribonucleotide
  modified_base 55: mod_base = OTHER; note = 2'-O-methyl ribonucleotide
  modified_base 56: mod_base = OTHER; note = 2'-O-methyl ribonucleotide
  modified_base 57: mod_base = OTHER; note = 2'-O-methyl ribonucleotide
  modified_base 60: mod_base = OTHER; note = 2'-O-methyl ribonucleotide
  modified_base 61: mod_base = OTHER; note = 2'-O-methyl ribonucleotide
  modified_base 66: mod_base = OTHER; note = 2'-O-methyl ribonucleotide
  modified_base 67: mod_base = OTHER; note = 2'-O-methyl ribonucleotide
  modified_base 70: mod_base = OTHER; note = 2'-O-methyl ribonucleotide
  modified_base 71: mod_base = OTHER; note = 2'-O-methyl ribonucleotide
  modified_base 72: mod_base = OTHER; note = 2'-O-methyl ribonucleotide
  modified_base 74: mod_base = OTHER; note = 2'-O-methyl ribonucleotide
  modified_base 75: mod_base = OTHER; note = 2'-O-methyl ribonucleotide
  modified_base 76: mod_base = OTHER; note = 2'-O-methyl ribonucleotide
  modified_base 77: mod_base = OTHER; note = 2'-O-methyl ribonucleotide
  modified_base 78: mod_base = OTHER; note = 2'-O-methyl ribonucleotide
  modified_base 79: mod_base = OTHER; note = 2'-O-methyl ribonucleotide
  modified_base 80: mod_base = OTHER; note = 2'-O-methyl ribonucleotide
  modified_base 82: mod_base = OTHER; note = 2'-O-methyl ribonucleotide
  modified_base 83: mod_base = OTHER; note = 2'-O-methyl ribonucleotide
  modified_base 84: mod_base = OTHER; note = 2'-O-methyl ribonucleotide
  modified_base 85: mod_base = OTHER; note = 2'-O-methyl ribonucleotide
  modified_base 86: mod_base = OTHER; note = 2'-O-methyl ribonucleotide
  modified_base 87: mod_base = OTHER; note = 2'-O-methyl ribonucleotide
  modified_base 89: mod_base = OTHER; note = 2'-O-methyl ribonucleotide
  modified_base 92: mod_base = OTHER; note = 2'-O-methyl ribonucleotide
  modified_base 93: mod_base = OTHER; note = 2'-O-methyl ribonucleotide
  modified_base 94: mod_base = OTHER; note = 2'-O-methyl ribonucleotide
  modified_base 95: mod_base = OTHER; note = 2'-O-methyl ribonucleotide
  modified_base 96: mod_base = OTHER; note = 2'-O-methyl ribonucleotide
  modified_base 97: mod_base = OTHER; note = 2'-O-methyl ribonucleotide
  modified_base 98: mod_base = OTHER; note = 2'-O-methyl ribonucleotide
  modified_base 99: mod_base = OTHER; note = 2'-O-methyl ribonucleotide
  modified_base 100: mod_base = OTHER; note = 2'-O-methyl ribonucleotide
  modified_base 101: mod_base = OTHER; note = uniform ribonucleotides (A, C, G, inosine or U), deoxynucleotides (A, G, C, inosine or T), ribonebularine, 2'-O-methylnebularine or deoxynebularine
  modified_base 102: mod_base = OTHER; note = uniform ribonucleotides (A, C, G, inosine or U), deoxynucleotides (A, G, C, inosine or T), ribonebularine, 2'-O-methylnebularine or deoxynebularine
  modified_base 103: mod_base = OTHER; note = uniform ribonucleotides (A, C, G, inosine or U), deoxynucleotides (A, G, C, inosine or T), ribonebularine, 2'-O-methylnebularine or deoxynebularine
  modified_base 1..4: mod_base = OTHER; note = phosphorothioate linkage
  modified_base 45..46: mod_base = OTHER; note = phosphorothioate linkage
  modified_base 64..65: mod_base = OTHER; note = phosphorothioate linkage
  modified_base 98..100: mod_base = OTHER; note = phosphorothioate linkage
  misc_feature 1..100: note = RNA
  misc_feature 101..103: note = Optionally DNA or RNA

SEQ ID NO: 3025 - DNA, 103 bp, synthetic construct; identical to SEQ ID NO: 1797
  source 1..103: mol_type = other DNA
  modified_base 1: mod_base = OTHER; note = 2'-O-methyl ribonucleotide
  modified_base 2: mod_base = OTHER; note = 2'-O-methyl ribonucleotide
  modified_base 3: mod_base = OTHER; note = 2'-O-methyl ribonucleotide
  modified_base 21: mod_base = OTHER; note = 2'-O-methyl ribonucleotide
  modified_base 28: mod_base = OTHER; note = 2'-O-methyl ribonucleotide
  modified_base 29: mod_base = OTHER; note = 2'-O-methyl ribonucleotide
  modified_base 30: mod_base = OTHER; note = 2'-O-methyl ribonucleotide
  modified_base 31: mod_base = OTHER; note = 2'-O-methyl ribonucleotide
  modified_base 32: mod_base = OTHER; note = 2'-O-methyl ribonucleotide
  modified_base 33: mod_base = OTHER; note = 2'-O-methyl ribonucleotide
  modified_base 34: mod_base = OTHER; note = 2'-O-methyl ribonucleotide
  modified_base 35: mod_base = OTHER; note = 2'-O-methyl ribonucleotide
  modified_base 36: mod_base = OTHER; note = 2'-O-methyl ribonucleotide
  modified_base 37: mod_base = OTHER; note = 2'-O-methyl ribonucleotide
  modified_base 38: mod_base = OTHER; note = 2'-O-methyl ribonucleotide
  modified_base 39: mod_base = OTHER; note = 2'-O-methyl ribonucleotide
  modified_base 40: mod_base = OTHER; note = 2'-O-methyl ribonucleotide
  modified_base 41: mod_base = OTHER; note = 2'-O-methyl ribonucleotide
  modified_base 42: mod_base = OTHER; note = 2'-O-methyl ribonucleotide
  modified_base 46: mod_base = OTHER; note = 2'-O-methyl ribonucleotide
  modified_base 48: mod_base = OTHER; note = 2'-O-methyl ribonucleotide
  modified_base 50: mod_base = OTHER; note = 2'-O-methyl ribonucleotide
  modified_base 52: mod_base = OTHER; note = 2'-O-methyl ribonucleotide
  modified_base 53: mod_base = OTHER; note = 2'-O-methyl ribonucleotide
  modified_base 54: mod_base = OTHER; note = 2'-O-methyl ribonucleotide
  modified_base 57: mod_base = OTHER; note = 2'-O-methyl ribonucleotide
  modified_base 61: mod_base = OTHER; note = 2'-O-methyl ribonucleotide
  modified_base 66: mod_base = OTHER; note = 2'-O-methyl ribonucleotide
  modified_base 67: mod_base = OTHER; note = 2'-O-methyl ribonucleotide
  modified_base 70: mod_base = OTHER; note = 2'-O-methyl ribonucleotide
  modified_base 71: mod_base = OTHER; note = 2'-O-methyl ribonucleotide
  modified_base 72: mod_base = OTHER; note = 2'-O-methyl ribonucleotide
  modified_base 73: mod_base = OTHER; note = 2'-O-methyl ribonucleotide
  modified_base 74: mod_base = OTHER; note = 2'-O-methyl ribonucleotide
  modified_base 75: mod_base = OTHER; note = 2'-O-methyl ribonucleotide
  modified_base 76: mod_base = OTHER; note = 2'-O-methyl ribonucleotide
  modified_base 77: mod_base = OTHER; note = 2'-O-methyl ribonucleotide
  modified_base 78: mod_base = OTHER; note = 2'-O-methyl ribonucleotide
  modified_base 79: mod_base = OTHER; note = 2'-O-methyl ribonucleotide
  modified_base 80: mod_base = OTHER; note = 2'-O-methyl ribonucleotide
  modified_base 82: mod_base = OTHER; note = 2'-O-methyl ribonucleotide
  modified_base 83: mod_base = OTHER; note = 2'-O-methyl ribonucleotide
  modified_base 84: mod_base = OTHER; note = 2'-O-methyl ribonucleotide
  modified_base 85: mod_base = OTHER; note = 2'-O-methyl ribonucleotide
  modified_base 86: mod_base = OTHER; note = 2'-O-methyl ribonucleotide
  modified_base 87: mod_base = OTHER; note = 2'-O-methyl ribonucleotide
  modified_base 89: mod_base = OTHER; note = 2'-O-methyl ribonucleotide
  modified_base 92: mod_base = OTHER; note = 2'-O-methyl ribonucleotide
  modified_base 93: mod_base = OTHER; note = 2'-O-methyl ribonucleotide
  modified_base 94: mod_base = OTHER; note = 2'-O-methyl ribonucleotide
  modified_base 95: mod_base = OTHER; note = 2'-O-methyl ribonucleotide
  modified_base 96: mod_base = OTHER; note = 2'-O-methyl ribonucleotide
  modified_base 97: mod_base = OTHER; note = 2'-O-methyl ribonucleotide
  modified_base 98: mod_base = OTHER; note = 2'-O-methyl ribonucleotide
  modified_base 99: mod_base = OTHER; note = 2'-O-methyl ribonucleotide
  modified_base 100: mod_base = OTHER; note = 2'-O-methyl ribonucleotide
  modified_base 101: mod_base = OTHER; note = uniform ribonucleotides (A, C, G, inosine or U), deoxynucleotides (A, G, C, inosine or T), ribonebularine, 2'-O-methylnebularine or deoxynebularine
  modified_base 102: mod_base = OTHER; note = uniform ribonucleotides (A, C, G, inosine or U), deoxynucleotides (A, G, C, inosine or T), ribonebularine, 2'-O-methylnebularine or deoxynebularine
  modified_base 103: mod_base = OTHER; note = uniform ribonucleotides (A, C, G, inosine or U), deoxynucleotides (A, G, C, inosine or T), ribonebularine, 2'-O-methylnebularine or deoxynebularine
  modified_base 1..4: mod_base = OTHER; note = phosphorothioate linkage
  modified_base 45..46: mod_base = OTHER; note = phosphorothioate linkage
  modified_base 64..65: mod_base = OTHER; note = phosphorothioate linkage
  modified_base 98..100: mod_base = OTHER; note = phosphorothioate linkage
  misc_feature 1..100: note = RNA
  misc_feature 101..103: note = Optionally DNA or RNA

SEQ ID NO: 3026 - DNA, 103 bp, synthetic construct; identical to SEQ ID NO: 1797
  source 1..103: mol_type = other DNA
  modified_base 1: mod_base = OTHER; note = 2'-O-methyl ribonucleotide
  modified_base 2: mod_base = OTHER; note = 2'-O-methyl ribonucleotide
  modified_base 3: mod_base = OTHER; note = 2'-O-methyl ribonucleotide
  modified_base 21: mod_base = OTHER; note = 2'-O-methyl ribonucleotide
  modified_base 28: mod_base = OTHER; note = 2'-O-methyl ribonucleotide
  modified_base 29: mod_base = OTHER; note = 2'-O-methyl ribonucleotide
  modified_base 30: mod_base = OTHER; note = 2'-O-methyl ribonucleotide
  modified_base 31: mod_base = OTHER; note = 2'-O-methyl ribonucleotide
  modified_base 32: mod_base = OTHER; note = 2'-O-methyl ribonucleotide
  modified_base 34: mod_base = OTHER; note = 2'-O-methyl ribonucleotide
  modified_base 35: mod_base = OTHER; note = 2'-O-methyl ribonucleotide
  modified_base 36: mod_base = OTHER; note = 2'-O-methyl ribonucleotide
  modified_base 37: mod_base = OTHER; note = 2'-O-methyl ribonucleotide
  modified_base 38: mod_base = OTHER; note = 2'-O-methyl ribonucleotide
  modified_base 39: mod_base = OTHER; note = 2'-O-methyl ribonucleotide
  modified_base 40: mod_base = OTHER; note = 2'-O-methyl ribonucleotide
  modified_base 41: mod_base = OTHER; note = 2'-O-methyl ribonucleotide
  modified_base 42: mod_base = OTHER; note = 2'-O-methyl ribonucleotide
  modified_base 46: mod_base = OTHER; note = 2'-O-methyl ribonucleotide
  modified_base 48: mod_base = OTHER; note = 2'-O-methyl ribonucleotide
  modified_base 50: mod_base = OTHER; note = 2'-O-methyl ribonucleotide
  modified_base 52: mod_base = OTHER; note = 2'-O-methyl ribonucleotide
  modified_base 53: mod_base = OTHER; note = 2'-O-methyl ribonucleotide
  modified_base 54: mod_base = OTHER; note = 2'-O-methyl ribonucleotide
  modified_base 57: mod_base = OTHER; note = 2'-O-methyl ribonucleotide
  modified_base 61: mod_base = OTHER; note = 2'-O-methyl ribonucleotide
  modified_base 66: mod_base = OTHER; note = 2'-O-methyl ribonucleotide
  modified_base 67: mod_base = OTHER; note = 2'-O-methyl ribonucleotide
  modified_base 70: mod_base = OTHER; note = 2'-O-methyl ribonucleotide
  modified_base 71: mod_base = OTHER; note = 2'-O-methyl ribonucleotide
  modified_base 72: mod_base = OTHER; note = 2'-O-methyl ribonucleotide
  modified_base 73: mod_base = OTHER; note = 2'-O-methyl ribonucleotide
  modified_base 74: mod_base = OTHER; note = 2'-O-methyl ribonucleotide
  modified_base 75: mod_base = OTHER; note = 2'-O-methyl ribonucleotide
  modified_base 76: mod_base = OTHER; note = 2'-O-methyl ribonucleotide
  modified_base 77: mod_base = OTHER; note = 2'-O-methyl ribonucleotide
  modified_base 78: mod_base = OTHER; note = 2'-O-methyl ribonucleotide
  modified_base 79: mod_base = OTHER; note = 2'-O-methyl ribonucleotide
  modified_base 80: mod_base = OTHER; note = 2'-O-methyl ribonucleotide
  modified_base 82: mod_base = OTHER; note = 2'-O-methyl ribonucleotide
  modified_base 83: mod_base = OTHER; note = 2'-O-methyl ribonucleotide
  modified_base 84: mod_base = OTHER; note = 2'-O-methyl ribonucleotide
  modified_base 85: mod_base = OTHER; note = 2'-O-methyl ribonucleotide
  modified_base 86: mod_base = OTHER; note = 2'-O-methyl ribonucleotide
  modified_base 87: mod_base = OTHER; note = 2'-O-methyl ribonucleotide
  modified_base 89: mod_base = OTHER; note = 2'-O-methyl ribonucleotide
  modified_base 92: mod_base = OTHER; note = 2'-O-methyl ribonucleotide
  modified_base 93: mod_base = OTHER; note = 2'-O-methyl ribonucleotide
  modified_base 94: mod_base = OTHER; note = 2'-O-methyl ribonucleotide
  modified_base 95: mod_base = OTHER; note = 2'-O-methyl ribonucleotide
  modified_base 96: mod_base = OTHER; note = 2'-O-methyl ribonucleotide
  modified_base 97: mod_base = OTHER; note = 2'-O-methyl ribonucleotide
  modified_base 98: mod_base = OTHER; note = 2'-O-methyl ribonucleotide
  modified_base 99: mod_base = OTHER; note = 2'-O-methyl ribonucleotide
  modified_base 100: mod_base = OTHER; note = 2'-O-methyl ribonucleotide
  modified_base 101: mod_base = OTHER; note = uniform ribonucleotides (A, C, G, inosine or U), deoxynucleotides (A, G, C, inosine or T), ribonebularine, 2'-O-methylnebularine or deoxynebularine
  modified_base 102: mod_base = OTHER; note = uniform ribonucleotides (A, C, G, inosine or U), deoxynucleotides (A, G, C, inosine or T), ribonebularine, 2'-O-methylnebularine or deoxynebularine
  modified_base 103: mod_base = OTHER; note = uniform ribonucleotides (A, C, G, inosine or U), deoxynucleotides (A, G, C, inosine or T), ribonebularine, 2'-O-methylnebularine or deoxynebularine
  modified_base 1..4: mod_base = OTHER; note = phosphorothioate linkage
  modified_base 45..46: mod_base = OTHER; note = phosphorothioate linkage
  modified_base 64..65: mod_base = OTHER; note = phosphorothioate linkage
  modified_base 98..100: mod_base = OTHER; note = phosphorothioate linkage
  misc_feature 1..100: note = RNA
  misc_feature 101..103: note = Optionally DNA or RNA

SEQ ID NO: 3027 - DNA, 103 bp, synthetic construct; identical to SEQ ID NO: 1797
  source 1..103: mol_type = other DNA
  modified_base 1: mod_base = OTHER; note = 2'-O-methyl ribonucleotide
  modified_base 2: mod_base = OTHER; note = 2'-O-methyl ribonucleotide
  modified_base 3: mod_base = OTHER; note = 2'-O-methyl ribonucleotide
  modified_base 21: mod_base = OTHER; note = 2'-O-methyl ribonucleotide
  modified_base 28: mod_base = OTHER; note = 2'-O-methyl ribonucleotide
  modified_base 29: mod_base = OTHER; note = 2'-O-methyl ribonucleotide
  modified_base 30: mod_base = OTHER; note = 2'-O-methyl ribonucleotide
  modified_base 31: mod_base = OTHER; note = 2'-O-methyl ribonucleotide
  modified_base 32: mod_base = OTHER; note = 2'-O-methyl ribonucleotide
  modified_base 34: mod_base = OTHER; note = 2'-O-methyl ribonucleotide
  modified_base 35: mod_base = OTHER; note = 2'-O-methyl ribonucleotide
  modified_base 36: mod_base = OTHER; note = 2'-O-methyl ribonucleotide
  modified_base 37: mod_base = OTHER; note = 2'-O-methyl ribonucleotide
  modified_base 38: mod_base = OTHER; note = 2'-O-methyl ribonucleotide
  modified_base 39: mod_base = OTHER; note = 2'-O-methyl ribonucleotide
  modified_base 40: mod_base = OTHER; note = 2'-O-methyl ribonucleotide
  modified_base 41: mod_base = OTHER; note = 2'-O-methyl ribonucleotide
  modified_base 42: mod_base = OTHER; note = 2'-O-methyl ribonucleotide
  modified_base 46: mod_base = OTHER; note = 2'-O-methyl ribonucleotide
  modified_base 48: mod_base = OTHER; note = 2'-O-methyl ribonucleotide
  modified_base 50: mod_base = OTHER; note = 2'-O-methyl ribonucleotide
  modified_base 52: mod_base = OTHER; note = 2'-O-methyl ribonucleotide
  modified_base 53: mod_base = OTHER; note = 2'-O-methyl ribonucleotide
  modified_base 54: mod_base = OTHER; note = 2'-O-methyl ribonucleotide
  modified_base 57: mod_base = OTHER; note = 2'-O-methyl ribonucleotide
  modified_base 61: mod_base = OTHER; note = 2'-O-methyl ribonucleotide
  modified_base 66: mod_base = OTHER; note = 2'-O-methyl ribonucleotide
  modified_base 67: mod_base = OTHER; note = 2'-O-methyl ribonucleotide
  modified_base 70: mod_base = OTHER; note = 2'-O-methyl ribonucleotide
  modified_base 71: mod_base = OTHER; note = 2'-O-methyl ribonucleotide
  modified_base 72: mod_base = OTHER; note = 2'-O-methyl ribonucleotide
  modified_base 73: mod_base = OTHER; note = 2'-O-methyl ribonucleotide
  modified_base 74: mod_base = OTHER; note = 2'-O-methyl ribonucleotide
  modified_base 75: mod_base = OTHER; note = 2'-O-methyl ribonucleotide
  modified_base 76: mod_base = OTHER; note = 2'-O-methyl ribonucleotide
  modified_base 77: mod_base = OTHER; note = 2'-O-methyl ribonucleotide
  modified_base 78: mod_base = OTHER; note = 2'-O-methyl ribonucleotide
  modified_base 79: mod_base = OTHER; note = 2'-O-methyl ribonucleotide
  modified_base 80: mod_base = OTHER; note = 2'-O-methyl ribonucleotide
  modified_base 82: mod_base = OTHER; note = 2'-O-methyl ribonucleotide
  modified_base 83: mod_base = OTHER; note = 2'-O-methyl ribonucleotide
  modified_base 84: mod_base = OTHER; note = 2'-O-methyl ribonucleotide
  modified_base 85: mod_base = OTHER; note = 2'-O-methyl ribonucleotide
  modified_base 86: mod_base = OTHER; note = 2'-O-methyl ribonucleotide
  modified_base 87: mod_base = OTHER; note = 2'-O-methyl ribonucleotide
  modified_base 89: mod_base = OTHER; note = 2'-O-methyl ribonucleotide
  modified_base 91: mod_base = OTHER; note = 2'-O-methyl ribonucleotide
  modified_base 92: mod_base = OTHER; note = 2'-O-methyl ribonucleotide
  modified_base 93: mod_base = OTHER; note = 2'-O-methyl ribonucleotide
  modified_base 94: mod_base = OTHER; note = 2'-O-methyl ribonucleotide
  modified_base 95: mod_base = OTHER; note = 2'-O-methyl ribonucleotide
  modified_base 96: mod_base = OTHER; note = 2'-O-methyl ribonucleotide
  modified_base 97: mod_base = OTHER; note = 2'-O-methyl ribonucleotide
  modified_base 98: mod_base = OTHER; note = 2'-O-methyl ribonucleotide
  modified_base 99: mod_base = OTHER; note = 2'-O-methyl ribonucleotide
  modified_base 100: mod_base = OTHER; note = 2'-O-methyl ribonucleotide
  modified_base 101: mod_base = OTHER; note = uniform ribonucleotides (A, C, G, inosine or U), deoxynucleotides (A, G, C, inosine or T), ribonebularine, 2'-O-methylnebularine or deoxynebularine
  modified_base 102: mod_base = OTHER; note = uniform ribonucleotides (A, C, G, inosine or U), deoxynucleotides (A, G, C, inosine or T), ribonebularine, 2'-O-methylnebularine or deoxynebularine
  modified_base 103: mod_base = OTHER; note = uniform ribonucleotides (A, C, G, inosine or U), deoxynucleotides (A, G, C, inosine or T), ribonebularine, 2'-O-methylnebularine or deoxynebularine
  modified_base 1..4: mod_base = OTHER; note = phosphorothioate linkage
  modified_base 45..46: mod_base = OTHER; note = phosphorothioate linkage
  modified_base 64..65: mod_base = OTHER; note = phosphorothioate linkage
  modified_base 98..100: mod_base = OTHER; note = phosphorothioate linkage
  misc_feature 1..100: note = RNA
  misc_feature 101..103: note = Optionally DNA or RNA

SEQ ID NO: 3028 - DNA, 103 bp, synthetic construct; identical to SEQ ID NO: 1797
  source 1..103: mol_type = other DNA
  modified_base 1: mod_base = OTHER; note = 2'-O-methyl ribonucleotide
  modified_base 2: mod_base = OTHER; note = 2'-O-methyl ribonucleotide
  modified_base 3: mod_base = OTHER; note = 2'-O-methyl ribonucleotide
  modified_base 21: mod_base = OTHER; note = 2'-O-methyl ribonucleotide
  modified_base 28: mod_base = OTHER; note = 2'-O-methyl ribonucleotide
  modified_base 29: mod_base = OTHER; note = 2'-O-methyl ribonucleotide
  modified_base 30: mod_base = OTHER; note = 2'-O-methyl ribonucleotide
  modified_base 31: mod_base = OTHER; note = 2'-O-methyl ribonucleotide
  modified_base 32: mod_base = OTHER; note = 2'-O-methyl ribonucleotide
  modified_base 34: mod_base = OTHER; note = 2'-O-methyl ribonucleotide
  modified_base 35: mod_base = OTHER; note = 2'-O-methyl ribonucleotide
  modified_base 36: mod_base = OTHER; note = 2'-O-methyl ribonucleotide
  modified_base 37: mod_base = OTHER; note = 2'-O-methyl ribonucleotide
  modified_base 38: mod_base = OTHER; note = 2'-O-methyl ribonucleotide
  modified_base 39: mod_base = OTHER; note = 2'-O-methyl ribonucleotide
  modified_base 40: mod_base = OTHER; note = 2'-O-methyl ribonucleotide
  modified_base 41: mod_base = OTHER; note = 2'-O-methyl ribonucleotide
  modified_base 42: mod_base = OTHER; note = 2'-O-methyl ribonucleotide
  modified_base 46: mod_base = OTHER; note = 2'-O-methyl ribonucleotide
  modified_base 48: mod_base = OTHER; note = 2'-O-methyl ribonucleotide
  modified_base 50: mod_base = OTHER; note = 2'-O-methyl ribonucleotide
  modified_base 52: mod_base = OTHER; note = 2'-O-methyl ribonucleotide
  modified_base 53: mod_base = OTHER; note = 2'-O-methyl ribonucleotide
  modified_base 54: mod_base = OTHER; note = 2'-O-methyl ribonucleotide
  modified_base 55: mod_base = OTHER; note = 2'-O-methyl ribonucleotide
  modified_base 56: mod_base = OTHER; note = 2'-O-methyl ribonucleotide
  modified_base 57: mod_base = OTHER; note = 2'-O-methyl ribonucleotide
  modified_base 60: mod_base = OTHER; note = 2'-O-methyl ribonucleotide
  modified_base 61: mod_base = OTHER; note = 2'-O-methyl ribonucleotide
  modified_base 66: mod_base = OTHER; note = 2'-O-methyl ribonucleotide
  modified_base 67: mod_base = OTHER; note = 2'-O-methyl ribonucleotide
  modified_base 70: mod_base = OTHER; note = 2'-O-methyl ribonucleotide
  modified_base 71: mod_base = OTHER; note = 2'-O-methyl ribonucleotide
  modified_base 72: mod_base = OTHER; note = 2'-O-methyl ribonucleotide
  modified_base 74: mod_base = OTHER; note = 2'-O-methyl ribonucleotide
  modified_base 75: mod_base = OTHER; note = 2'-O-methyl ribonucleotide
  modified_base 76: mod_base = OTHER; note = 2'-O-methyl ribonucleotide
  modified_base 77: mod_base = OTHER; note = 2'-O-methyl ribonucleotide
  modified_base 78: mod_base = OTHER; note = 2'-O-methyl ribonucleotide
  modified_base 79: mod_base = OTHER; note = 2'-O-methyl ribonucleotide
  modified_base 80: mod_base = OTHER; note = 2'-O-methyl ribonucleotide
  modified_base 82: mod_base = OTHER; note = 2'-O-methyl ribonucleotide
  modified_base 83: mod_base = OTHER; note = 2'-O-methyl ribonucleotide
  modified_base 84: mod_base = OTHER; note = 2'-O-methyl ribonucleotide
  modified_base 85: mod_base = OTHER; note = 2'-O-methyl ribonucleotide
  modified_base 86: mod_base = OTHER; note = 2'-O-methyl ribonucleotide
  modified_base 87: mod_base = OTHER; note = 2'-O-methyl ribonucleotide
  modified_base 89: mod_base = OTHER; note = 2'-O-methyl ribonucleotide
  modified_base 92: mod_base = OTHER; note = 2'-O-methyl ribonucleotide
  modified_base 93: mod_base = OTHER; note = 2'-O-methyl ribonucleotide
  modified_base 94: mod_base = OTHER; note = 2'-O-methyl ribonucleotide
  modified_base 95: mod_base = OTHER; note = 2'-O-methyl ribonucleotide
  modified_base 96: mod_base = OTHER; note = 2'-O-methyl ribonucleotide
  modified_base 97: mod_base = OTHER; note = 2'-O-methyl ribonucleotide
  modified_base 98: mod_base = OTHER; note = 2'-O-methyl ribonucleotide
  modified_base 99: mod_base = OTHER; note = 2'-O-methyl ribonucleotide
  modified_base 100: mod_base = OTHER; note = 2'-O-methyl ribonucleotide
  modified_base 101: mod_base = OTHER; note = uniform ribonucleotides (A, C, G, inosine or U), deoxynucleotides (A, G, C, inosine or T), ribonebularine, 2'-O-methylnebularine or deoxynebularine
  modified_base 102: mod_base = OTHER; note = uniform ribonucleotides (A, C, G, inosine or U), deoxynucleotides (A, G, C, inosine or T), ribonebularine, 2'-O-methylnebularine or deoxynebularine
  modified_base 103: mod_base = OTHER; note = uniform ribonucleotides (A, C, G, inosine or U), deoxynucleotides (A, G, C, inosine or T), ribonebularine, 2'-O-methylnebularine or deoxynebularine
  modified_base 1..4: mod_base = OTHER; note = phosphorothioate linkage
  modified_base 45..46: mod_base = OTHER; note = phosphorothioate linkage
  modified_base 64..65: mod_base = OTHER; note = phosphorothioate linkage
  modified_base 98..100: mod_base = OTHER; note = phosphorothioate linkage
  misc_feature 1..100: note = RNA
  misc_feature 101..103: note = Optionally DNA or RNA

SEQ ID NO: 3029 - DNA, 103 bp, synthetic construct; identical to SEQ ID NO: 1795
  source 1..103: mol_type = other DNA
  modified_base 1: mod_base = OTHER; note = 2'-O-methyl ribonucleotide
  modified_base 2: mod_base = OTHER; note = 2'-O-methyl ribonucleotide
  modified_base 3: mod_base = OTHER; note = 2'-O-methyl ribonucleotide
  modified_base 21: mod_base = OTHER; note = 2'-O-methyl ribonucleotide
  modified_base 28: mod_base = OTHER; note = 2'-O-methyl ribonucleotide
  modified_base 29: mod_base = OTHER; note = 2'-O-methyl ribonucleotide
  modified_base 30: mod_base = OTHER; note = 2'-O-methyl ribonucleotide
  modified_base 31: mod_base = OTHER; note = 2'-O-methyl ribonucleotide
  modified_base 32: mod_base = OTHER; note = 2'-O-methyl ribonucleotide
  modified_base 33: mod_base = OTHER; note = 2'-O-methyl ribonucleotide
  modified_base 34: mod_base = OTHER; note = 2'-O-methyl ribonucleotide
  modified_base 35: mod_base = OTHER; note = 2'-O-methyl ribonucleotide
  modified_base 36: mod_base = OTHER; note = 2'-O-methyl ribonucleotide
  modified_base 37: mod_base = OTHER; note = 2'-O-methyl ribonucleotide
  modified_base 38: mod_base = OTHER; note = 2'-O-methyl ribonucleotide
  modified_base 39: mod_base = OTHER; note = 2'-O-methyl ribonucleotide
  modified_base 40: mod_base = OTHER; note = 2'-O-methyl ribonucleotide
  modified_base 41: mod_base = OTHER; note = 2'-O-methyl ribonucleotide
  modified_base 42: mod_base = OTHER; note = 2'-O-methyl ribonucleotide
  modified_base 46: mod_base = OTHER; note = 2'-O-methyl ribonucleotide
  modified_base 48: mod_base = OTHER; note = 2'-O-methyl ribonucleotide
  modified_base 50: mod_base = OTHER; note = 2'-O-methyl ribonucleotide
  modified_base 52: mod_base = OTHER; note = 2'-O-methyl ribonucleotide
  modified_base 53: mod_base = OTHER; note = 2'-O-methyl ribonucleotide
  modified_base 54: mod_base = OTHER; note = 2'-O-methyl ribonucleotide
  modified_base 55: mod_base = OTHER; note = 2'-O-methyl ribonucleotide
  modified_base 56: mod_base = OTHER; note = 2'-O-methyl ribonucleotide
  modified_base 57: mod_base = OTHER; note = 2'-O-methyl ribonucleotide
  modified_base 60: mod_base = OTHER; note = 2'-O-methyl ribonucleotide
  modified_base 61: mod_base = OTHER; note = 2'-O-methyl ribonucleotide
  modified_base 66: mod_base = OTHER; note = 2'-O-methyl ribonucleotide
  modified_base 67: mod_base = OTHER; note = 2'-O-methyl ribonucleotide
  modified_base 70: mod_base = OTHER; note = 2'-O-methyl ribonucleotide
  modified_base 71: mod_base = OTHER; note = 2'-O-methyl ribonucleotide
  modified_base 72: mod_base = OTHER; note = 2'-O-methyl ribonucleotide
  modified_base 73: mod_base = OTHER; note = 2'-O-methyl ribonucleotide
  modified_base 74: mod_base = OTHER; note = 2'-O-methyl ribonucleotide
  modified_base 75: mod_base = OTHER; note = 2'-O-methyl ribonucleotide
  modified_base 76: mod_base = OTHER; note = 2'-O-methyl ribonucleotide
  modified_base 77: mod_base = OTHER; note = 2'-O-methyl ribonucleotide
  modified_base 78: mod_base = OTHER; note = 2'-O-methyl ribonucleotide
  modified_base 79: mod_base = OTHER; note = 2'-O-methyl ribonucleotide
  modified_base 80: mod_base = OTHER; note = 2'-O-methyl ribonucleotide
  modified_base 81: mod_base = OTHER; note = 2'-O-methyl ribonucleotide
  modified_base 83: mod_base = OTHER; note = 2'-O-methyl ribonucleotide
  modified_base 84: mod_base = OTHER; note = 2'-O-methyl ribonucleotide
  modified_base 85: mod_base = OTHER; note = 2'-O-methyl ribonucleotide
  modified_base 86: mod_base = OTHER; note = 2'-O-methyl ribonucleotide
  modified_base 87: mod_base = OTHER; note = 2'-O-methyl ribonucleotide
  modified_base 88: mod_base = OTHER; note = 2'-O-methyl ribonucleotide
  modified_base 89: mod_base = OTHER; note = 2'-O-methyl ribonucleotide
  modified_base 90: mod_base = OTHER; note = 2'-O-methyl ribonucleotide
  modified_base 91: mod_base = OTHER; note = 2'-O-methyl ribonucleotide
  modified_base 92: mod_base = OTHER; note = 2'-O-methyl ribonucleotide
  modified_base 93: mod_base = OTHER; note = 2'-O-methyl ribonucleotide
  modified_base 94: mod_base = OTHER; note = 2'-O-methyl ribonucleotide
  modified_base 95: mod_base = OTHER; note = 2'-O-methyl ribonucleotide
  modified_base 96: mod_base = OTHER; note = 2'-O-methyl ribonucleotide
  modified_base 97: mod_base = OTHER; note = 2'-O-methyl ribonucleotide
  modified_base 98: mod_base = OTHER; note = 2'-O-methyl ribonucleotide
  modified_base 99: mod_base = OTHER; note = 2'-O-methyl ribonucleotide
  modified_base 100: mod_base = OTHER; note = 2'-O-methyl ribonucleotide
  modified_base 101: mod_base = OTHER; note = uniform ribonucleotides (A, C, G, inosine or U), deoxynucleotides (A, G, C, inosine or T), ribonebularine, 2'-O-methylnebularine or deoxynebularine
  modified_base 102: mod_base = OTHER; note = uniform ribonucleotides (A, C, G, inosine or U), deoxynucleotides (A, G, C, inosine or T), ribonebularine, 2'-O-methylnebularine or deoxynebularine
  modified_base 103: mod_base = OTHER; note = uniform ribonucleotides (A, C, G, inosine or U), deoxynucleotides (A, G, C, inosine or T), ribonebularine, 2'-O-methylnebularine or deoxynebularine
  modified_base 1..4: mod_base = OTHER; note = phosphorothioate linkage
  modified_base 25..26: mod_base = OTHER; note = phosphorothioate linkage
  modified_base 45..46: mod_base = OTHER; note = phosphorothioate linkage
  modified_base 98..100: mod_base = OTHER; note = phosphorothioate linkage
  misc_feature 1..100: note = RNA
  misc_feature 101..103: note = Optionally DNA or RNA

SEQ ID NO: 3030 - DNA, 103 bp, synthetic construct; identical to SEQ ID NO: 1795
  source 1..103: mol_type = other DNA
  modified_base 1: mod_base = OTHER; note = 2'-O-methyl ribonucleotide
  modified_base 2: mod_base = OTHER; note = 2'-O-methyl ribonucleotide
  modified_base 3: mod_base = OTHER; note = 2'-O-methyl ribonucleotide
  modified_base 21: mod_base = OTHER; note = 2'-O-methyl ribonucleotide
  modified_base 28: mod_base = OTHER; note = 2'-O-methyl ribonucleotide
  modified_base 29: mod_base = OTHER; note = 2'-O-methyl ribonucleotide
  modified_base 30: mod_base = OTHER; note = 2'-O-methyl ribonucleotide
  modified_base 31: mod_base = OTHER; note = 2'-O-methyl ribonucleotide
  modified_base 32: mod_base = OTHER; note = 2'-O-methyl ribonucleotide
  modified_base 34: mod_base = OTHER; note = 2'-O-methyl ribonucleotide
  modified_base 35: mod_base = OTHER; note = 2'-O-methyl ribonucleotide
  modified_base 36: mod_base = OTHER; note = 2'-O-methyl ribonucleotide
  modified_base 37: mod_base = OTHER; note = 2'-O-methyl ribonucleotide
  modified_base 38: mod_base = OTHER; note = 2'-O-methyl ribonucleotide
  modified_base 39: mod_base = OTHER; note = 2'-O-methyl ribonucleotide
  modified_base 40: mod_base = OTHER; note = 2'-O-methyl ribonucleotide
  modified_base 41: mod_base = OTHER; note = 2'-O-methyl ribonucleotide
  modified_base 42: mod_base = OTHER; note = 2'-O-methyl ribonucleotide
  modified_base 46: mod_base = OTHER; note = 2'-O-methyl ribonucleotide
  modified_base 48: mod_base = OTHER; note = 2'-O-methyl ribonucleotide
  modified_base 50: mod_base = OTHER; note = 2'-O-methyl ribonucleotide
  modified_base 52: mod_base = OTHER; note = 2'-O-methyl ribonucleotide
  modified_base 53: mod_base = OTHER; note = 2'-O-methyl ribonucleotide
  modified_base 54: mod_base = OTHER; note = 2'-O-methyl ribonucleotide
  modified_base 55: mod_base = OTHER; note = 2'-O-methyl ribonucleotide
  modified_base 56: mod_base = OTHER; note = 2'-O-methyl ribonucleotide
  modified_base 57: mod_base = OTHER; note = 2'-O-methyl ribonucleotide
  modified_base 60: mod_base = OTHER; note = 2'-O-methyl ribonucleotide
  modified_base 61: mod_base = OTHER; note = 2'-O-methyl ribonucleotide
  modified_base 66: mod_base = OTHER; note = 2'-O-methyl ribonucleotide
  modified_base 67: mod_base = OTHER; note = 2'-O-methyl ribonucleotide
  modified_base 70: mod_base = OTHER; note = 2'-O-methyl ribonucleotide
  modified_base 71: mod_base = OTHER; note = 2'-O-methyl ribonucleotide
  modified_base 72: mod_base = OTHER; note = 2'-O-methyl ribonucleotide
  modified_base 74: mod_base = OTHER; note = 2'-O-methyl ribonucleotide
  modified_base 75: mod_base = OTHER; note = 2'-O-methyl ribonucleotide
  modified_base 76: mod_base = OTHER; note = 2'-O-methyl ribonucleotide
  modified_base 77: mod_base = OTHER; note = 2'-O-methyl ribonucleotide
  modified_base 78: mod_base = OTHER; note = 2'-O-methyl ribonucleotide
  modified_base 79: mod_base = OTHER; note = 2'-O-methyl ribonucleotide
  modified_base 80: mod_base = OTHER; note = 2'-O-methyl ribonucleotide
  modified_base 81: mod_base = OTHER; note = 2'-O-methyl ribonucleotide
  modified_base 83: mod_base = OTHER; note = 2'-O-methyl ribonucleotide
  modified_base 84: mod_base = OTHER; note = 2'-O-methyl ribonucleotide
  modified_base 85: mod_base = OTHER; note = 2'-O-methyl ribonucleotide
  modified_base 86: mod_base = OTHER; note = 2'-O-methyl ribonucleotide
  modified_base 87: mod_base = OTHER; note = 2'-O-methyl ribonucleotide
  modified_base 88: mod_base = OTHER; note = 2'-O-methyl ribonucleotide
  modified_base 89: mod_base = OTHER; note = 2'-O-methyl ribonucleotide
  modified_base 90: mod_base = OTHER; note = 2'-O-methyl ribonucleotide
  modified_base 91: mod_base = OTHER; note = 2'-O-methyl ribonucleotide
  modified_base 92: mod_base = OTHER; note = 2'-O-methyl ribonucleotide
  modified_base 93: mod_base = OTHER; note = 2'-O-methyl ribonucleotide
  modified_base 94: mod_base = OTHER; note = 2'-O-methyl ribonucleotide
  modified_base 95: mod_base = OTHER; note = 2'-O-methyl ribonucleotide
  modified_base 96: mod_base = OTHER; note = 2'-O-methyl ribonucleotide
  modified_base 97: mod_base = OTHER; note = 2'-O-methyl ribonucleotide
  modified_base 98: mod_base = OTHER; note = 2'-O-methyl ribonucleotide
  modified_base 99: mod_base = OTHER; note = 2'-O-methyl ribonucleotide
  modified_base 100: mod_base = OTHER; note = 2'-O-methyl ribonucleotide
  modified_base 101: mod_base = OTHER; note = uniform ribonucleotides (A, C, G, inosine or U), deoxynucleotides (A, G, C, inosine or T), ribonebularine, 2'-O-methylnebularine or deoxynebularine
  modified_base 102: mod_base = OTHER; note = uniform ribonucleotides (A, C, G, inosine or U), deoxynucleotides (A, G, C, inosine or T), ribonebularine, 2'-O-methylnebularine or deoxynebularine
  modified_base 103: mod_base = OTHER; note = uniform ribonucleotides (A, C, G, inosine or U), deoxynucleotides (A, G, C, inosine or T), ribonebularine, 2'-O-methylnebularine or deoxynebularine
  modified_base 1..4: mod_base = OTHER; note = phosphorothioate linkage
  modified_base 25..26: mod_base = OTHER; note = phosphorothioate linkage
  modified_base 45..46: mod_base = OTHER; note = phosphorothioate linkage
  modified_base 98..100: mod_base = OTHER; note = phosphorothioate linkage
  misc_feature 1..100: note = RNA
  misc_feature 101..103: note = Optionally DNA or RNA

SEQ ID NO: 3031 - DNA, 103 bp, synthetic construct; identical to SEQ ID NO: 1796
  source 1..103: mol_type = other DNA
  modified_base 1: mod_base = OTHER; note = 2'-O-methyl ribonucleotide
  modified_base 2: mod_base = OTHER; note = 2'-O-methyl ribonucleotide
  modified_base 3: mod_base = OTHER; note = 2'-O-methyl ribonucleotide
  modified_base 21: mod_base = OTHER; note = 2'-O-methyl ribonucleotide
  modified_base 28: mod_base = OTHER; note = 2'-O-methyl ribonucleotide
  modified_base 29: mod_base = OTHER; note = 2'-O-methyl ribonucleotide
  modified_base 30: mod_base = OTHER; note = 2'-O-methyl ribonucleotide
  modified_base 31: mod_base = OTHER; note = 2'-O-methyl ribonucleotide
  modified_base 32: mod_base = OTHER; note = 2'-O-methyl ribonucleotide
  modified_base 33: mod_base = OTHER; note = 2'-O-methyl ribonucleotide
  modified_base 34: mod_base = OTHER; note = 2'-O-methyl ribonucleotide
  modified_base 35: mod_base = OTHER; note = 2'-O-methyl ribonucleotide
  modified_base 36: mod_base = OTHER; note = 2'-O-methyl ribonucleotide
  modified_base 37: mod_base = OTHER; note = 2'-O-methyl ribonucleotide
  modified_base 38: mod_base = OTHER; note = 2'-O-methyl ribonucleotide
  modified_base 39: mod_base = OTHER; note = 2'-O-methyl ribonucleotide
  modified_base 40: mod_base = OTHER; note = 2'-O-methyl ribonucleotide
  modified_base 41: mod_base = OTHER; note = 2'-O-methyl ribonucleotide
  modified_base 42: mod_base = OTHER; note = 2'-O-methyl ribonucleotide
  modified_base 46: mod_base = OTHER; note = 2'-O-methyl ribonucleotide
  modified_base 48: mod_base = OTHER; note = 2'-O-methyl ribonucleotide
  modified_base 50: mod_base = OTHER; note = 2'-O-methyl ribonucleotide
  modified_base 52: mod_base = OTHER; note = 2'-O-methyl ribonucleotide
  modified_base 53: mod_base = OTHER; note = 2'-O-methyl ribonucleotide
  modified_base 54: mod_base = OTHER; note = 2'-O-methyl ribonucleotide
  modified_base 55: mod_base = OTHER; note = 2'-O-methyl ribonucleotide
  modified_base 56: mod_base = OTHER; note = 2'-O-methyl ribonucleotide
  modified_base 57: mod_base = OTHER; note = 2'-O-methyl ribonucleotide
  modified_base 60: mod_base = OTHER; note = 2'-O-methyl ribonucleotide
  modified_base 61: mod_base = OTHER; note = 2'-O-methyl ribonucleotide
  modified_base 66: mod_base = OTHER; note = 2'-O-methyl ribonucleotide
  modified_base 67: mod_base = OTHER; note = 2'-O-methyl ribonucleotide
  modified_base 70: mod_base = OTHER; note = 2'-O-methyl ribonucleotide
  modified_base 71: mod_base = OTHER; note = 2'-O-methyl ribonucleotide
  modified_base 72: mod_base = OTHER; note = 2'-O-methyl ribonucleotide
  modified_base 73: mod_base = OTHER; note = 2'-O-methyl ribonucleotide
  modified_base 74: mod_base = OTHER; note = 2'-O-methyl ribonucleotide
  modified_base 75: mod_base = OTHER; note = 2'-O-methyl ribonucleotide
  modified_base 76: mod_base = OTHER; note = 2'-O-methyl ribonucleotide
  modified_base 77: mod_base = OTHER; note = 2'-O-methyl ribonucleotide
  modified_base 78: mod_base = OTHER; note = 2'-O-methyl ribonucleotide
  modified_base 79: mod_base = OTHER; note = 2'-O-methyl ribonucleotide
  modified_base 80: mod_base = OTHER; note = 2'-O-methyl ribonucleotide
  modified_base 81: mod_base = OTHER; note = 2'-O-methyl ribonucleotide
  modified_base 83: mod_base = OTHER; note = 2'-O-methyl ribonucleotide
  modified_base 84: mod_base = OTHER; note = 2'-O-methyl ribonucleotide
  modified_base 85: mod_base = OTHER; note = 2'-O-methyl ribonucleotide
  modified_base 86: mod_base = OTHER; note = 2'-O-methyl ribonucleotide
  modified_base 87: mod_base = OTHER; note = 2'-O-methyl ribonucleotide
  modified_base 88: mod_base = OTHER; note = 2'-O-methyl ribonucleotide
  modified_base 89: mod_base = OTHER; note = 2'-O-methyl ribonucleotide
  modified_base 90: mod_base = OTHER; note = 2'-O-methyl ribonucleotide
  modified_base 91: mod_base = OTHER; note = 2'-O-methyl ribonucleotide
  modified_base 92: mod_base = OTHER; note = 2'-O-methyl ribonucleotide
  modified_base 93: mod_base = OTHER; note = 2'-O-methyl ribonucleotide
  modified_base 94: mod_base = OTHER; note = 2'-O-methyl ribonucleotide
  modified_base 95: mod_base = OTHER; note = 2'-O-methyl ribonucleotide
  modified_base 96: mod_base = OTHER; note = 2'-O-methyl ribonucleotide
  modified_base 97: mod_base = OTHER; note = 2'-O-methyl ribonucleotide
  modified_base 98: mod_base = OTHER; note = 2'-O-methyl ribonucleotide
  modified_base 99: mod_base = OTHER; note = 2'-O-methyl ribonucleotide
  modified_base 100: mod_base = OTHER; note = 2'-O-methyl ribonucleotide
  modified_base 101: mod_base = OTHER; note = uniform ribonucleotides (A, C, G, inosine or U), deoxynucleotides (A, G, C, inosine or T), ribonebularine, 2'-O-methylnebularine or deoxynebularine
  modified_base 102: mod_base = OTHER; note = uniform ribonucleotides (A, C, G, inosine or U), deoxynucleotides (A, G, C, inosine or T), ribonebularine, 2'-O-methylnebularine or deoxynebularine
  modified_base 103: mod_base = OTHER; note = uniform ribonucleotides (A, C, G, inosine or U), deoxynucleotides (A, G, C, inosine or T), ribonebularine, 2'-O-methylnebularine or deoxynebularine
  modified_base 1..4: mod_base = OTHER; note = phosphorothioate linkage
  modified_base 25..26: mod_base = OTHER; note = phosphorothioate linkage
  modified_base 45..46: mod_base = OTHER; note = phosphorothioate linkage
  modified_base 98..100: mod_base = OTHER; note = phosphorothioate linkage
  misc_feature 1..100: note = RNA
  misc_feature 101..103: note = Optionally DNA or RNA

SEQ ID NO: 3032 - DNA, 103 bp, synthetic construct; identical to SEQ ID NO: 1796
  source 1..103: mol_type = other DNA
  modified_base 1: mod_base = OTHER; note = 2'-O-methyl ribonucleotide
  modified_base 2: mod_base = OTHER; note = 2'-O-methyl ribonucleotide
  modified_base 3: mod_base = OTHER; note = 2'-O-methyl ribonucleotide
  modified_base 21: mod_base = OTHER; note = 2'-O-methyl ribonucleotide
  modified_base 28: mod_base = OTHER; note = 2'-O-methyl ribonucleotide
  modified_base 29: mod_base = OTHER; note = 2'-O-methyl ribonucleotide
  modified_base 30: mod_base = OTHER; note = 2'-O-methyl ribonucleotide
  modified_base 31: mod_base = OTHER; note = 2'-O-methyl ribonucleotide
  modified_base 32: mod_base = OTHER; note = 2'-O-methyl ribonucleotide
  modified_base 34: mod_base = OTHER; note = 2'-O-methyl ribonucleotide
  modified_base 35: mod_base = OTHER; note = 2'-O-methyl ribonucleotide
  modified_base 36: mod_base = OTHER; note = 2'-O-methyl ribonucleotide
  modified_base 37: mod_base = OTHER; note = 2'-O-methyl ribonucleotide
  modified_base 38: mod_base = OTHER; note = 2'-O-methyl ribonucleotide
  modified_base 39: mod_base = OTHER; note = 2'-O-methyl ribonucleotide
  modified_base 40: mod_base = OTHER; note = 2'-O-methyl ribonucleotide
  modified_base 41: mod_base = OTHER; note = 2'-O-methyl ribonucleotide
  modified_base 42: mod_base = OTHER; note = 2'-O-methyl ribonucleotide
  modified_base 46: mod_base = OTHER; note = 2'-O-methyl ribonucleotide
  modified_base 48: mod_base = OTHER; note = 2'-O-methyl ribonucleotide
  modified_base 50: mod_base = OTHER; note = 2'-O-methyl ribonucleotide
  modified_base 52: mod_base = OTHER; note = 2'-O-methyl ribonucleotide
  modified_base 53: mod_base = OTHER; note = 2'-O-methyl ribonucleotide
  modified_base 54: mod_base = OTHER; note = 2'-O-methyl ribonucleotide
  modified_base 55: mod_base = OTHER; note = 2'-O-methyl ribonucleotide
  modified_base 56: mod_base = OTHER; note = 2'-O-methyl ribonucleotide
  modified_base 57: mod_base = OTHER; note = 2'-O-methyl ribonucleotide
  modified_base 60: mod_base = OTHER; note = 2'-O-methyl ribonucleotide
  modified_base 61: mod_base = OTHER; note = 2'-O-methyl ribonucleotide
  modified_base 66: mod_base = OTHER; note = 2'-O-methyl ribonucleotide
  modified_base 67: mod_base = OTHER; note = 2'-O-methyl ribonucleotide
  modified_base 70: mod_base = OTHER; note = 2'-O-methyl ribonucleotide
  modified_base 71: mod_base = OTHER; note = 2'-O-methyl ribonucleotide
  modified_base 72: mod_base = OTHER; note = 2'-O-methyl ribonucleotide
  modified_base 74: mod_base = OTHER; note = 2'-O-methyl ribonucleotide
  modified_base 75: mod_base = OTHER; note = 2'-O-methyl ribonucleotide
  modified_base 76: mod_base = OTHER; note = 2'-O-methyl ribonucleotide
  modified_base 77: mod_base = OTHER; note = 2'-O-methyl ribonucleotide
  modified_base 78: mod_base = OTHER; note = 2'-O-methyl ribonucleotide
  modified_base 79: mod_base = OTHER; note = 2'-O-methyl ribonucleotide
  modified_base 80: mod_base = OTHER; note = 2'-O-methyl ribonucleotide
  modified_base 81: mod_base = OTHER; note = 2'-O-methyl ribonucleotide
  modified_base 83: mod_base = OTHER; note = 2'-O-methyl ribonucleotide
  modified_base 84: mod_base = OTHER; note = 2'-O-methyl ribonucleotide
  modified_base 85: mod_base = OTHER; note = 2'-O-methyl ribonucleotide
  modified_base 86: mod_base = OTHER; note = 2'-O-methyl ribonucleotide
  modified_base 87: mod_base = OTHER; note = 2'-O-methyl ribonucleotide
  modified_base 88: mod_base = OTHER; note = 2'-O-methyl ribonucleotide
  modified_base 89: mod_base = OTHER; note = 2'-O-methyl ribonucleotide
  modified_base 90: mod_base = OTHER; note = 2'-O-methyl ribonucleotide
  modified_base 91: mod_base = OTHER; note = 2'-O-methyl ribonucleotide
  modified_base 92: mod_base = OTHER; note = 2'-O-methyl ribonucleotide
  modified_base 93: mod_base = OTHER; note = 2'-O-methyl ribonucleotide
  modified_base 94: mod_base = OTHER; note = 2'-O-methyl ribonucleotide
  modified_base 95: mod_base = OTHER; note = 2'-O-methyl ribonucleotide
  modified_base 96: mod_base = OTHER; note = 2'-O-methyl ribonucleotide
  modified_base 97: mod_base = OTHER; note = 2'-O-methyl ribonucleotide
  modified_base 98: mod_base = OTHER; note = 2'-O-methyl ribonucleotide
  modified_base 99: mod_base = OTHER; note = 2'-O-methyl ribonucleotide
  modified_base 100: mod_base = OTHER; note = 2'-O-methyl ribonucleotide
  modified_base 101: mod_base = OTHER; note = uniform ribonucleotides (A, C, G, inosine or U), deoxynucleotides (A, G, C, inosine or T), ribonebularine, 2'-O-methylnebularine or deoxynebularine
  modified_base 102: mod_base = OTHER; note = uniform ribonucleotides (A, C, G, inosine or U), deoxynucleotides (A, G, C, inosine or T), ribonebularine, 2'-O-methylnebularine or deoxynebularine
  modified_base 103: mod_base = OTHER; note = uniform ribonucleotides (A, C, G, inosine or U), deoxynucleotides (A, G, C, inosine or T), ribonebularine, 2'-O-methylnebularine or deoxynebularine
  modified_base 1..4: mod_base = OTHER; note = phosphorothioate linkage
  modified_base 25..26: mod_base = OTHER; note = phosphorothioate linkage
  modified_base 45..46: mod_base = OTHER; note = phosphorothioate linkage
  modified_base 98..100: mod_base = OTHER; note = phosphorothioate linkage
  misc_feature 1..100: note = RNA
  misc_feature 101..103: note = Optionally DNA or RNA

SEQ ID NO: 3033 - DNA, 103 bp, synthetic construct; identical to SEQ ID NO: 1797
  source 1..103: mol_type = other DNA
  modified_base 1: mod_base = OTHER; note = 2'-O-methyl ribonucleotide
  modified_base 2: mod_base = OTHER; note = 2'-O-methyl ribonucleotide
  modified_base 3: mod_base = OTHER; note = 2'-O-methyl ribonucleotide
  modified_base 21: mod_base = OTHER; note = 2'-O-methyl ribonucleotide
  modified_base 28: mod_base = OTHER; note = 2'-O-methyl ribonucleotide
  modified_base 29: mod_base = OTHER; note = 2'-O-methyl ribonucleotide
  modified_base 30: mod_base = OTHER; note = 2'-O-methyl ribonucleotide
  modified_base 31: mod_base = OTHER; note = 2'-O-methyl ribonucleotide
  modified_base 32: mod_base = OTHER; note = 2'-O-methyl ribonucleotide
  modified_base 33: mod_base = OTHER; note = 2'-O-methyl ribonucleotide
  modified_base 34: mod_base = OTHER; note = 2'-O-methyl ribonucleotide
  modified_base 35: mod_base = OTHER; note = 2'-O-methyl ribonucleotide
  modified_base 36: mod_base = OTHER; note = 2'-O-methyl ribonucleotide
  modified_base 37: mod_base = OTHER; note = 2'-O-methyl ribonucleotide
  modified_base 38: mod_base = OTHER; note = 2'-O-methyl ribonucleotide
  modified_base 39: mod_base = OTHER; note = 2'-O-methyl ribonucleotide
  modified_base 40: mod_base = OTHER; note = 2'-O-methyl ribonucleotide
  modified_base 41: mod_base = OTHER; note = 2'-O-methyl ribonucleotide
  modified_base 42: mod_base = OTHER; note = 2'-O-methyl ribonucleotide
  modified_base 46: mod_base = OTHER; note = 2'-O-methyl ribonucleotide
  modified_base 48: mod_base = OTHER; note = 2'-O-methyl ribonucleotide
  modified_base 50: mod_base = OTHER; note = 2'-O-methyl ribonucleotide
  modified_base 52: mod_base = OTHER; note = 2'-O-methyl ribonucleotide
  modified_base 53: mod_base = OTHER; note = 2'-O-methyl ribonucleotide
  modified_base 54: mod_base = OTHER; note = 2'-O-methyl ribonucleotide
  modified_base 57: mod_base = OTHER; note = 2'-O-methyl ribonucleotide
  modified_base 61: mod_base = OTHER; note = 2'-O-methyl ribonucleotide
  modified_base 66: mod_base = OTHER; note = 2'-O-methyl ribonucleotide
  modified_base 67: mod_base = OTHER; note = 2'-O-methyl ribonucleotide
  modified_base 70: mod_base = OTHER; note = 2'-O-methyl ribonucleotide
  modified_base 71: mod_base = OTHER; note = 2'-O-methyl ribonucleotide
  modified_base 72: mod_base = OTHER; note = 2'-O-methyl ribonucleotide
  modified_base 74: mod_base = OTHER; note = 2'-O-methyl ribonucleotide
  modified_base 75: mod_base = OTHER; note = 2'-O-methyl ribonucleotide
  modified_base 76: mod_base = OTHER; note = 2'-O-methyl ribonucleotide
  modified_base 77: mod_base = OTHER; note = 2'-O-methyl ribonucleotide
  modified_base 78: mod_base = OTHER; note = 2'-O-methyl ribonucleotide
  modified_base 79: mod_base = OTHER; note = 2'-O-methyl ribonucleotide
  modified_base 80: mod_base = OTHER; note = 2'-O-methyl ribonucleotide
  modified_base 82: mod_base = OTHER; note = 2'-O-methyl ribonucleotide
  modified_base 83: mod_base = OTHER; note = 2'-O-methyl ribonucleotide
  modified_base 84: mod_base = OTHER; note = 2'-O-methyl ribonucleotide
  modified_base 85: mod_base = OTHER; note = 2'-O-methyl ribonucleotide
  modified_base 86: mod_base = OTHER; note = 2'-O-methyl ribonucleotide
  modified_base 87: mod_base = OTHER; note = 2'-O-methyl ribonucleotide
  modified_base 89: mod_base = OTHER; note = 2'-O-methyl ribonucleotide
  modified_base 92: mod_base = OTHER; note = 2'-O-methyl ribonucleotide
  modified_base 93: mod_base = OTHER; note = 2'-O-methyl ribonucleotide
  modified_base 94: mod_base = OTHER; note = 2'-O-methyl ribonucleotide
  modified_base 95: mod_base = OTHER; note = 2'-O-methyl ribonucleotide
  modified_base 96: mod_base = OTHER; note = 2'-O-methyl ribonucleotide
  modified_base 97: mod_base = OTHER; note = 2'-O-methyl ribonucleotide
  modified_base 98: mod_base = OTHER; note = 2'-O-methyl ribonucleotide
  modified_base 99: mod_base = OTHER; note = 2'-O-methyl ribonucleotide
  modified_base 100: mod_base = OTHER; note = 2'-O-methyl ribonucleotide
  modified_base 101: mod_base = OTHER; note = uniform ribonucleotides (A, C, G, inosine or U), deoxynucleotides (A, G, C, inosine or T), ribonebularine, 2'-O-methylnebularine or deoxynebularine
  modified_base 102: mod_base = OTHER; note = uniform ribonucleotides (A, C, G, inosine or U), deoxynucleotides (A, G, C, inosine or T), ribonebularine, 2'-O-methylnebularine or deoxynebularine
  modified_base 103: mod_base = OTHER; note = uniform ribonucleotides (A, C, G, inosine or U), deoxynucleotides (A, G, C, inosine or T), ribonebularine, 2'-O-methylnebularine or deoxynebularine
  modified_base 1..4: mod_base = OTHER; note = phosphorothioate linkage
  modified_base 25..26: mod_base = OTHER; note = phosphorothioate linkage
  modified_base 45..46: mod_base = OTHER; note = phosphorothioate linkage
  modified_base 98..100: mod_base = OTHER; note = phosphorothioate linkage
  misc_feature 1..100: note = RNA
  misc_feature 101..103: note = Optionally DNA or RNA

SEQ ID NO: 3034 - DNA, 103 bp, synthetic construct; identical to SEQ ID NO: 1797
  source 1..103: mol_type = other DNA
  modified_base 1: mod_base = OTHER; note = 2'-O-methyl ribonucleotide
  modified_base 2: mod_base = OTHER; note = 2'-O-methyl ribonucleotide
  modified_base 3: mod_base = OTHER; note = 2'-O-methyl ribonucleotide
  modified_base 21: mod_base = OTHER; note = 2'-O-methyl ribonucleotide
  modified_base 28: mod_base = OTHER; note = 2'-O-methyl ribonucleotide
  modified_base 29: mod_base = OTHER; note = 2'-O-methyl ribonucleotide
  modified_base 30: mod_base = OTHER; note = 2'-O-methyl ribonucleotide
  modified_base 31: mod_base = OTHER; note = 2'-O-methyl ribonucleotide
  modified_base 32: mod_base = OTHER; note = 2'-O-methyl ribonucleotide
  modified_base 33: mod_base = OTHER; note = 2'-O-methyl ribonucleotide
  modified_base 34: mod_base = OTHER; note = 2'-O-methyl ribonucleotide
  modified_base 35: mod_base = OTHER; note = 2'-O-methyl ribonucleotide
  modified_base 36: mod_base = OTHER; note = 2'-O-methyl ribonucleotide
  modified_base 37: mod_base = OTHER; note = 2'-O-methyl ribonucleotide
  modified_base 38: mod_base = OTHER; note = 2'-O-methyl ribonucleotide
  modified_base 39: mod_base = OTHER; note = 2'-O-methyl ribonucleotide
  modified_base 40: mod_base = OTHER; note = 2'-O-methyl ribonucleotide
  modified_base 41: mod_base = OTHER; note = 2'-O-methyl ribonucleotide
  modified_base 42: mod_base = OTHER; note = 2'-O-methyl ribonucleotide
  modified_base 46: mod_base = OTHER; note = 2'-O-methyl ribonucleotide
  modified_base 48: mod_base = OTHER; note = 2'-O-methyl ribonucleotide
  modified_base 50: mod_base = OTHER; note = 2'-O-methyl ribonucleotide
  modified_base 52: mod_base = OTHER; note = 2'-O-methyl ribonucleotide
  modified_base 53: mod_base = OTHER; note = 2'-O-methyl ribonucleotide
  modified_base 54: mod_base = OTHER; note = 2'-O-methyl ribonucleotide
  modified_base 55: mod_base = OTHER; note = 2'-O-methyl ribonucleotide
  modified_base 56: mod_base = OTHER; note = 2'-O-methyl ribonucleotide
  modified_base 57: mod_base = OTHER; note = 2'-O-methyl ribonucleotide
  modified_base 60: mod_base = OTHER; note = 2'-O-methyl ribonucleotide
  modified_base 61: mod_base = OTHER; note = 2'-O-methyl ribonucleotide
  modified_base 66: mod_base = OTHER; note = 2'-O-methyl ribonucleotide
  modified_base 67: mod_base = OTHER; note = 2'-O-methyl ribonucleotide
  modified_base 70: mod_base = OTHER; note = 2'-O-methyl ribonucleotide
  modified_base 71: mod_base = OTHER; note = 2'-O-methyl ribonucleotide
  modified_base 72: mod_base = OTHER; note = 2'-O-methyl ribonucleotide
  modified_base 74: mod_base = OTHER; note = 2'-O-methyl ribonucleotide
  modified_base 75: mod_base = OTHER; note = 2'-O-methyl ribonucleotide
  modified_base 76: mod_base = OTHER; note = 2'-O-methyl ribonucleotide
  modified_base 77: mod_base = OTHER; note = 2'-O-methyl ribonucleotide
  modified_base 78: mod_base = OTHER; note = 2'-O-methyl ribonucleotide
  modified_base 79: mod_base = OTHER; note = 2'-O-methyl ribonucleotide
  modified_base 80: mod_base = OTHER; note = 2'-O-methyl ribonucleotide
  modified_base 82: mod_base = OTHER; note = 2'-O-methyl ribonucleotide
  modified_base 83: mod_base = OTHER; note = 2'-O-methyl ribonucleotide
  modified_base 84: mod_base = OTHER; note = 2'-O-methyl ribonucleotide
  modified_base 85: mod_base = OTHER; note = 2'-O-methyl ribonucleotide
  modified_base 86: mod_base = OTHER; note = 2'-O-methyl ribonucleotide
  modified_base 87: mod_base = OTHER; note = 2'-O-methyl ribonucleotide
  modified_base 89: mod_base = OTHER; note = 2'-O-methyl ribonucleotide
  modified_base 92: mod_base = OTHER; note = 2'-O-methyl ribonucleotide
  modified_base 93: mod_base = OTHER; note = 2'-O-methyl ribonucleotide
  modified_base 94: mod_base = OTHER; note = 2'-O-methyl ribonucleotide
  modified_base 95: mod_base = OTHER; note = 2'-O-methyl ribonucleotide
  modified_base 96: mod_base = OTHER; note = 2'-O-methyl ribonucleotide
  modified_base 97: mod_base = OTHER; note = 2'-O-methyl ribonucleotide
  modified_base 98: mod_base = OTHER; note = 2'-O-methyl ribonucleotide
  modified_base 99: mod_base = OTHER; note = 2'-O-methyl ribonucleotide
  modified_base 100: mod_base = OTHER; note = 2'-O-methyl ribonucleotide
  modified_base 101: mod_base = OTHER; note = uniform ribonucleotides (A, C, G, inosine or U), deoxynucleotides (A, G, C, inosine or T), ribonebularine, 2'-O-methylnebularine or deoxynebularine
  modified_base 102: mod_base = OTHER; note = uniform ribonucleotides (A, C, G, inosine or U), deoxynucleotides (A, G, C, inosine or T), ribonebularine, 2'-O-methylnebularine or deoxynebularine
  modified_base 103: mod_base = OTHER; note = uniform ribonucleotides (A, C, G, inosine or U), deoxynucleotides (A, G, C, inosine or T), ribonebularine, 2'-O-methylnebularine or deoxynebularine
  modified_base 1..4: mod_base = OTHER; note = phosphorothioate linkage
  modified_base 25..26: mod_base = OTHER; note = phosphorothioate linkage
  modified_base 45..46: mod_base = OTHER; note = phosphorothioate linkage
  modified_base 98..100: mod_base = OTHER; note = phosphorothioate linkage
  misc_feature 1..100: note = RNA
  misc_feature 101..103: note = Optionally DNA or RNA

SEQ ID NO: 3035 - DNA, 103 bp, synthetic construct; identical to SEQ ID NO: 1797
  source 1..103: mol_type = other DNA
  modified_base 1: mod_base = OTHER; note = 2'-O-methyl ribonucleotide
  modified_base 2: mod_base = OTHER; note = 2'-O-methyl ribonucleotide
  modified_base 3: mod_base = OTHER; note = 2'-O-methyl ribonucleotide
  modified_base 21: mod_base = OTHER; note = 2'-O-methyl ribonucleotide
  modified_base 28: mod_base = OTHER; note = 2'-O-methyl ribonucleotide
  modified_base 29: mod_base = OTHER; note = 2'-O-methyl ribonucleotide
  modified_base 30: mod_base = OTHER; note = 2'-O-methyl ribonucleotide
  modified_base 31: mod_base = OTHER; note = 2'-O-methyl ribonucleotide
  modified_base 32: mod_base = OTHER; note = 2'-O-methyl ribonucleotide
  modified_base 33: mod_base = OTHER; note = 2'-O-methyl ribonucleotide
  modified_base 34: mod_base = OTHER; note = 2'-O-methyl ribonucleotide
  modified_base 35: mod_base = OTHER; note = 2'-O-methyl ribonucleotide
  modified_base 36: mod_base = OTHER; note = 2'-O-methyl ribonucleotide
  modified_base 37: mod_base = OTHER; note = 2'-O-methyl ribonucleotide
  modified_base 38: mod_base = OTHER; note = 2'-O-methyl ribonucleotide
  modified_base 39: mod_base = OTHER; note = 2'-O-methyl ribonucleotide
  modified_base 40: mod_base = OTHER; note = 2'-O-methyl ribonucleotide
  modified_base 41: mod_base = OTHER; note = 2'-O-methyl ribonucleotide
  modified_base 42: mod_base = OTHER; note = 2'-O-methyl ribonucleotide
  modified_base 46: mod_base = OTHER; note = 2'-O-methyl ribonucleotide
  modified_base 48: mod_base = OTHER; note = 2'-O-methyl ribonucleotide
  modified_base 50: mod_base = OTHER; note = 2'-O-methyl ribonucleotide
  modified_base 52: mod_base = OTHER; note = 2'-O-methyl ribonucleotide
  modified_base 53: mod_base = OTHER; note = 2'-O-methyl ribonucleotide
  modified_base 54: mod_base = OTHER; note = 2'-O-methyl ribonucleotide
  modified_base 57: mod_base = OTHER; note = 2'-O-methyl ribonucleotide
  modified_base 61: mod_base = OTHER; note = 2'-O-methyl ribonucleotide
  modified_base 66: mod_base = OTHER; note = 2'-O-methyl ribonucleotide
  modified_base 67: mod_base = OTHER; note = 2'-O-methyl ribonucleotide
  modified_base 70: mod_base = OTHER; note = 2'-O-methyl ribonucleotide
  modified_base 71: mod_base = OTHER; note = 2'-O-methyl ribonucleotide
  modified_base 72: mod_base = OTHER; note = 2'-O-methyl ribonucleotide
  modified_base 73: mod_base = OTHER; note = 2'-O-methyl ribonucleotide
  modified_base 74: mod_base = OTHER; note = 2'-O-methyl ribonucleotide
  modified_base 75: mod_base = OTHER; note = 2'-O-methyl ribonucleotide
  modified_base 76: mod_base = OTHER; note = 2'-O-methyl ribonucleotide
  modified_base 77: mod_base = OTHER; note = 2'-O-methyl ribonucleotide
  modified_base 78: mod_base = OTHER; note = 2'-O-methyl ribonucleotide
  modified_base 79: mod_base = OTHER; note = 2'-O-methyl ribonucleotide
  modified_base 80: mod_base = OTHER; note = 2'-O-methyl ribonucleotide
  modified_base 82: mod_base = OTHER; note = 2'-O-methyl ribonucleotide
  modified_base 83: mod_base = OTHER; note = 2'-O-methyl ribonucleotide
  modified_base 84: mod_base = OTHER; note = 2'-O-methyl ribonucleotide
  modified_base 85: mod_base = OTHER; note = 2'-O-methyl ribonucleotide
  modified_base 86: mod_base = OTHER; note = 2'-O-methyl ribonucleotide
  modified_base 87: mod_base = OTHER; note = 2'-O-methyl ribonucleotide
  modified_base 89: mod_base = OTHER; note = 2'-O-methyl ribonucleotide
  modified_base 92: mod_base = OTHER; note = 2'-O-methyl ribonucleotide
  modified_base 93: mod_base = OTHER; note = 2'-O-methyl ribonucleotide
  modified_base 94: mod_base = OTHER; note = 2'-O-methyl ribonucleotide
  modified_base 95: mod_base = OTHER; note = 2'-O-methyl ribonucleotide
  modified_base 96: mod_base = OTHER; note = 2'-O-methyl ribonucleotide
  modified_base 97: mod_base = OTHER; note = 2'-O-methyl ribonucleotide
  modified_base 98: mod_base = OTHER; note = 2'-O-methyl ribonucleotide
  modified_base 99: mod_base = OTHER; note = 2'-O-methyl ribonucleotide
  modified_base 100: mod_base = OTHER; note = 2'-O-methyl ribonucleotide
  modified_base 101: mod_base = OTHER; note = uniform ribonucleotides (A, C, G, inosine or U), deoxynucleotides (A, G, C, inosine or T), ribonebularine, 2'-O-methylnebularine or deoxynebularine
  modified_base 102: mod_base = OTHER; note = uniform ribonucleotides (A, C, G, inosine or U), deoxynucleotides (A, G, C, inosine or T), ribonebularine, 2'-O-methylnebularine or deoxynebularine
  modified_base 103: mod_base = OTHER; note = uniform ribonucleotides (A, C, G, inosine or U), deoxynucleotides (A, G, C, inosine or T), ribonebularine, 2'-O-methylnebularine or deoxynebularine
  modified_base 1..4: mod_base = OTHER; note = phosphorothioate linkage
  modified_base 25..26: mod_base = OTHER; note = phosphorothioate linkage
  modified_base 45..46: mod_base = OTHER; note = phosphorothioate linkage
  modified_base 98..100: mod_base = OTHER; note = phosphorothioate linkage
  misc_feature 1..100: note = RNA
  misc_feature 101..103: note = Optionally DNA or RNA

SEQ ID NO: 3036 - DNA, 103 bp, synthetic construct; identical to SEQ ID NO: 1797
  source 1..103: mol_type = other DNA
  modified_base 1: mod_base = OTHER; note = 2'-O-methyl ribonucleotide
  modified_base 2: mod_base = OTHER; note = 2'-O-methyl ribonucleotide
  modified_base 3: mod_base = OTHER; note = 2'-O-methyl ribonucleotide
  modified_base 21: mod_base = OTHER; note = 2'-O-methyl ribonucleotide
  modified_base 28: mod_base = OTHER; note = 2'-O-methyl ribonucleotide
  modified_base 29: mod_base = OTHER; note = 2'-O-methyl ribonucleotide
  modified_base 30: mod_base = OTHER; note = 2'-O-methyl ribonucleotide
  modified_base 31: mod_base = OTHER; note = 2'-O-methyl ribonucleotide
  modified_base 32: mod_base = OTHER; note = 2'-O-methyl ribonucleotide
  modified_base 33: mod_base = OTHER; note = 2'-O-methyl ribonucleotide
  modified_base 34: mod_base = OTHER; note = 2'-O-methyl ribonucleotide
  modified_base 35: mod_base = OTHER; note = 2'-O-methyl ribonucleotide
  modified_base 36: mod_base = OTHER; note = 2'-O-methyl ribonucleotide
  modified_base 37: mod_base = OTHER; note = 2'-O-methyl ribonucleotide
  modified_base 38: mod_base = OTHER; note = 2'-O-methyl ribonucleotide
  modified_base 39: mod_base = OTHER; note = 2'-O-methyl ribonucleotide
  modified_base 40: mod_base = OTHER; note = 2'-O-methyl ribonucleotide
  modified_base 41: mod_base = OTHER; note = 2'-O-methyl ribonucleotide
  modified_base 42: mod_base = OTHER; note = 2'-O-methyl ribonucleotide
  modified_base 46: mod_base = OTHER; note = 2'-O-methyl ribonucleotide
  modified_base 48: mod_base = OTHER; note = 2'-O-methyl ribonucleotide
  modified_base 50: mod_base = OTHER; note = 2'-O-methyl ribonucleotide
  modified_base 52: mod_base = OTHER; note = 2'-O-methyl ribonucleotide
  modified_base 53: mod_base = OTHER; note = 2'-O-methyl ribonucleotide
  modified_base 54: mod_base = OTHER; note = 2'-O-methyl ribonucleotide
  modified_base 57: mod_base = OTHER; note = 2'-O-methyl ribonucleotide
  modified_base 61: mod_base = OTHER; note = 2'-O-methyl ribonucleotide
  modified_base 66: mod_base = OTHER; note = 2'-O-methyl ribonucleotide
  modified_base 67: mod_base = OTHER; note = 2'-O-methyl ribonucleotide
  modified_base 70: mod_base = OTHER; note = 2'-O-methyl ribonucleotide
  modified_base 71: mod_base = OTHER; note = 2'-O-methyl ribonucleotide
  modified_base 72: mod_base = OTHER; note = 2'-O-methyl ribonucleotide
  modified_base 73: mod_base = OTHER; note = 2'-O-methyl ribonucleotide
  modified_base 74: mod_base = OTHER; note = 2'-O-methyl ribonucleotide
  modified_base 75: mod_base = OTHER; note = 2'-O-methyl ribonucleotide
  modified_base 76: mod_base = OTHER; note = 2'-O-methyl ribonucleotide
  modified_base 77: mod_base = OTHER; note = 2'-O-methyl ribonucleotide
  modified_base 78: mod_base = OTHER; note = 2'-O-methyl ribonucleotide
  modified_base 79: mod_base = OTHER; note = 2'-O-methyl ribonucleotide
  modified_base 80: mod_base = OTHER; note = 2'-O-methyl ribonucleotide
  modified_base 82: mod_base = OTHER; note = 2'-O-methyl ribonucleotide
  modified_base 83: mod_base = OTHER; note = 2'-O-methyl ribonucleotide
  modified_base 84: mod_base = OTHER; note = 2'-O-methyl ribonucleotide
  modified_base 85: mod_base = OTHER; note = 2'-O-methyl ribonucleotide
  modified_base 86: mod_base = OTHER; note = 2'-O-methyl ribonucleotide
  modified_base 87: mod_base = OTHER; note = 2'-O-methyl ribonucleotide
  modified_base 89: mod_base = OTHER; note = 2'-O-methyl ribonucleotide
  modified_base 91: mod_base = OTHER; note = 2'-O-methyl ribonucleotide
  modified_base 92: mod_base = OTHER; note = 2'-O-methyl ribonucleotide
  modified_base 93: mod_base = OTHER; note = 2'-O-methyl ribonucleotide
  modified_base 94: mod_base = OTHER; note = 2'-O-methyl ribonucleotide
  modified_base 95: mod_base = OTHER; note = 2'-O-methyl ribonucleotide
  modified_base 96: mod_base = OTHER; note = 2'-O-methyl ribonucleotide
  modified_base 97: mod_base = OTHER; note = 2'-O-methyl ribonucleotide
  modified_base 98: mod_base = OTHER; note = 2'-O-methyl ribonucleotide
  modified_base 99: mod_base = OTHER; note = 2'-O-methyl ribonucleotide
  modified_base 100: mod_base = OTHER; note = 2'-O-methyl ribonucleotide
  modified_base 101: mod_base = OTHER; note = uniform ribonucleotides (A, C, G, inosine or U), deoxynucleotides (A, G, C, inosine or T), ribonebularine, 2'-O-methylnebularine or deoxynebularine
  modified_base 102: mod_base = OTHER; note = uniform ribonucleotides (A, C, G, inosine or U), deoxynucleotides (A, G, C, inosine or T), ribonebularine, 2'-O-methylnebularine or deoxynebularine
  modified_base 103: mod_base = OTHER; note = uniform ribonucleotides (A, C, G, inosine or U), deoxynucleotides (A, G, C, inosine or T), ribonebularine, 2'-O-methylnebularine or deoxynebularine
  modified_base 1..4: mod_base = OTHER; note = phosphorothioate linkage
  modified_base 25..26: mod_base = OTHER; note = phosphorothioate linkage
  modified_base 45..46: mod_base = OTHER; note = phosphorothioate linkage
  modified_base 98..100: mod_base = OTHER; note = phosphorothioate linkage
  misc_feature 1..100: note = RNA
  misc_feature 101..103: note = Optionally DNA or RNA

SEQ ID NO: 3037 - DNA, 103 bp, synthetic construct; identical to SEQ ID NO: 1797
  source 1..103: mol_type = other DNA
  modified_base 1: mod_base = OTHER; note = 2'-O-methyl ribonucleotide
  modified_base 2: mod_base = OTHER; note = 2'-O-methyl ribonucleotide
  modified_base 3: mod_base = OTHER; note = 2'-O-methyl ribonucleotide
  modified_base 21: mod_base = OTHER; note = 2'-O-methyl ribonucleotide
  modified_base 28: mod_base = OTHER; note = 2'-O-methyl ribonucleotide
  modified_base 29: mod_base = OTHER; note = 2'-O-methyl ribonucleotide
  modified_base 30: mod_base = OTHER; note = 2'-O-methyl ribonucleotide
  modified_base 31: mod_base = OTHER; note = 2'-O-methyl ribonucleotide
  modified_base 32: mod_base = OTHER; note = 2'-O-methyl ribonucleotide
  modified_base 34: mod_base = OTHER; note = 2'-O-methyl ribonucleotide
  modified_base 35: mod_base = OTHER; note = 2'-O-methyl ribonucleotide
  modified_base 36: mod_base = OTHER; note = 2'-O-methyl ribonucleotide
  modified_base 37: mod_base = OTHER; note = 2'-O-methyl ribonucleotide
  modified_base 38: mod_base = OTHER; note = 2'-O-methyl ribonucleotide
  modified_base 39: mod_base = OTHER; note = 2'-O-methyl ribonucleotide
  modified_base 40: mod_base = OTHER; note = 2'-O-methyl ribonucleotide
  modified_base 41: mod_base = OTHER; note = 2'-O-methyl ribonucleotide
  modified_base 42: mod_base = OTHER; note = 2'-O-methyl ribonucleotide
  modified_base 46: mod_base = OTHER; note = 2'-O-methyl ribonucleotide
  modified_base 48: mod_base = OTHER; note = 2'-O-methyl ribonucleotide
  modified_base 50: mod_base = OTHER; note = 2'-O-methyl ribonucleotide
  modified_base 52: mod_base = OTHER; note = 2'-O-methyl ribonucleotide
  modified_base 53: mod_base = OTHER; note = 2'-O-methyl ribonucleotide
  modified_base 54: mod_base = OTHER; note = 2'-O-methyl ribonucleotide
  modified_base 57: mod_base = OTHER; note = 2'-O-methyl ribonucleotide
  modified_base 61: mod_base = OTHER; note = 2'-O-methyl ribonucleotide
  modified_base 66: mod_base = OTHER; note = 2'-O-methyl ribonucleotide
  modified_base 67: mod_base = OTHER; note = 2'-O-methyl ribonucleotide
  modified_base 70: mod_base = OTHER; note = 2'-O-methyl ribonucleotide
  modified_base 71: mod_base = OTHER; note = 2'-O-methyl ribonucleotide
  modified_base 72: mod_base = OTHER; note = 2'-O-methyl ribonucleotide
  modified_base 73: mod_base = OTHER; note = 2'-O-methyl ribonucleotide
  modified_base 74: mod_base = OTHER; note = 2'-O-methyl ribonucleotide
  modified_base 75: mod_base = OTHER; note = 2'-O-methyl ribonucleotide
  modified_base 76: mod_base = OTHER; note = 2'-O-methyl ribonucleotide
  modified_base 77: mod_base = OTHER; note = 2'-O-methyl ribonucleotide
  modified_base 78: mod_base = OTHER; note = 2'-O-methyl ribonucleotide
  modified_base 79: mod_base = OTHER; note = 2'-O-methyl ribonucleotide
  modified_base 80: mod_base = OTHER; note = 2'-O-methyl ribonucleotide
  modified_base 82: mod_base = OTHER; note = 2'-O-methyl ribonucleotide
  modified_base 83: mod_base = OTHER; note = 2'-O-methyl ribonucleotide
  modified_base 84: mod_base = OTHER; note = 2'-O-methyl ribonucleotide
  modified_base 85: mod_base = OTHER; note = 2'-O-methyl ribonucleotide
  modified_base 86: mod_base = OTHER; note = 2'-O-methyl ribonucleotide
  modified_base 87: mod_base = OTHER; note = 2'-O-methyl ribonucleotide
  modified_base 89: mod_base = OTHER; note = 2'-O-methyl ribonucleotide
  modified_base 92: mod_base = OTHER; note = 2'-O-methyl ribonucleotide
  modified_base 93: mod_base = OTHER; note = 2'-O-methyl ribonucleotide
  modified_base 94: mod_base = OTHER; note = 2'-O-methyl ribonucleotide
  modified_base 95: mod_base = OTHER; note = 2'-O-methyl ribonucleotide
  modified_base 96: mod_base = OTHER; note = 2'-O-methyl ribonucleotide
  modified_base 97: mod_base = OTHER; note = 2'-O-methyl ribonucleotide
  modified_base 98: mod_base = OTHER; note = 2'-O-methyl ribonucleotide
  modified_base 99: mod_base = OTHER; note = 2'-O-methyl ribonucleotide
  modified_base 100: mod_base = OTHER; note = 2'-O-methyl ribonucleotide
  modified_base 101: mod_base = OTHER; note = uniform ribonucleotides (A, C, G, inosine or U), deoxynucleotides (A, G, C, inosine or T), ribonebularine, 2'-O-methylnebularine or deoxynebularine
  modified_base 102: mod_base = OTHER; note = uniform ribonucleotides (A, C, G, inosine or U), deoxynucleotides (A, G, C, inosine or T), ribonebularine, 2'-O-methylnebularine or deoxynebularine
  modified_base 103: mod_base = OTHER; note = uniform ribonucleotides (A, C, G, inosine or U), deoxynucleotides (A, G, C, inosine or T), ribonebularine, 2'-O-methylnebularine or deoxynebularine
  modified_base 1..4: mod_base = OTHER; note = phosphorothioate linkage
  modified_base 25..26: mod_base = OTHER; note = phosphorothioate linkage
  modified_base 45..46: mod_base = OTHER; note = phosphorothioate linkage
  modified_base 98..100: mod_base = OTHER; note = phosphorothioate linkage
  misc_feature 1..100: note = RNA
  misc_feature 101..103: note = Optionally DNA or RNA

SEQ ID NO: 3038 - DNA, 103 bp, synthetic construct; identical to SEQ ID NO: 1797
  source 1..103: mol_type = other DNA
  modified_base 1: mod_base = OTHER; note = 2'-O-methyl ribonucleotide
  modified_base 2: mod_base = OTHER; note = 2'-O-methyl ribonucleotide
  modified_base 3: mod_base = OTHER; note = 2'-O-methyl ribonucleotide
  modified_base 21: mod_base = OTHER; note = 2'-O-methyl ribonucleotide
  modified_base 28: mod_base = OTHER; note = 2'-O-methyl ribonucleotide
  modified_base 29: mod_base = OTHER; note = 2'-O-methyl ribonucleotide
  modified_base 30: mod_base = OTHER; note = 2'-O-methyl ribonucleotide
  modified_base 31: mod_base = OTHER; note = 2'-O-methyl ribonucleotide
  modified_base 32: mod_base = OTHER; note = 2'-O-methyl ribonucleotide
  modified_base 34: mod_base = OTHER; note = 2'-O-methyl ribonucleotide
  modified_base 35: mod_base = OTHER; note = 2'-O-methyl ribonucleotide
  modified_base 36: mod_base = OTHER; note = 2'-O-methyl ribonucleotide
  modified_base 37: mod_base = OTHER; note = 2'-O-methyl ribonucleotide
  modified_base 38: mod_base = OTHER; note = 2'-O-methyl ribonucleotide
  modified_base 39: mod_base = OTHER; note = 2'-O-methyl ribonucleotide
  modified_base 40: mod_base = OTHER; note = 2'-O-methyl ribonucleotide
  modified_base 41: mod_base = OTHER; note = 2'-O-methyl ribonucleotide
  modified_base 42: mod_base = OTHER; note = 2'-O-methyl ribonucleotide
  modified_base 46: mod_base = OTHER; note = 2'-O-methyl ribonucleotide
  modified_base 48: mod_base = OTHER; note = 2'-O-methyl ribonucleotide
  modified_base 50: mod_base = OTHER; note = 2'-O-methyl ribonucleotide
  modified_base 52: mod_base = OTHER; note = 2'-O-methyl ribonucleotide
  modified_base 53: mod_base = OTHER; note = 2'-O-methyl ribonucleotide
  modified_base 54: mod_base = OTHER; note = 2'-O-methyl ribonucleotide
  modified_base 57: mod_base = OTHER; note = 2'-O-methyl ribonucleotide
  modified_base 61: mod_base = OTHER; note = 2'-O-methyl ribonucleotide
  modified_base 66: mod_base = OTHER; note = 2'-O-methyl ribonucleotide
  modified_base 67: mod_base = OTHER; note = 2'-O-methyl ribonucleotide
  modified_base 70: mod_base = OTHER; note = 2'-O-methyl ribonucleotide
  modified_base 71: mod_base = OTHER; note = 2'-O-methyl ribonucleotide
  modified_base 72: mod_base = OTHER; note = 2'-O-methyl ribonucleotide
  modified_base 73: mod_base = OTHER; note = 2'-O-methyl ribonucleotide
  modified_base 74: mod_base = OTHER; note = 2'-O-methyl ribonucleotide
  modified_base 75: mod_base = OTHER; note = 2'-O-methyl ribonucleotide
  modified_base 76: mod_base = OTHER; note = 2'-O-methyl ribonucleotide
  modified_base 77: mod_base = OTHER; note = 2'-O-methyl ribonucleotide
  modified_base 78: mod_base = OTHER; note = 2'-O-methyl ribonucleotide
  modified_base 79: mod_base = OTHER; note = 2'-O-methyl ribonucleotide
  modified_base 80: mod_base = OTHER; note = 2'-O-methyl ribonucleotide
  modified_base 82: mod_base = OTHER; note = 2'-O-methyl ribonucleotide
  modified_base 83: mod_base = OTHER; note = 2'-O-methyl ribonucleotide
  modified_base 84: mod_base = OTHER; note = 2'-O-methyl ribonucleotide
  modified_base 85: mod_base = OTHER; note = 2'-O-methyl ribonucleotide
  modified_base 86: mod_base = OTHER; note = 2'-O-methyl ribonucleotide
  modified_base 87: mod_base = OTHER; note = 2'-O-methyl ribonucleotide
  modified_base 89: mod_base = OTHER; note = 2'-O-methyl ribonucleotide
  modified_base 91: mod_base = OTHER; note = 2'-O-methyl ribonucleotide
  modified_base 92: mod_base = OTHER; note = 2'-O-methyl ribonucleotide
  modified_base 93: mod_base = OTHER; note = 2'-O-methyl ribonucleotide
  modified_base 94: mod_base = OTHER; note = 2'-O-methyl ribonucleotide
  modified_base 95: mod_base = OTHER; note = 2'-O-methyl ribonucleotide
  modified_base 96: mod_base = OTHER; note = 2'-O-methyl ribonucleotide
  modified_base 97: mod_base = OTHER; note = 2'-O-methyl ribonucleotide
  modified_base 98: mod_base = OTHER; note = 2'-O-methyl ribonucleotide
  modified_base 99: mod_base = OTHER; note = 2'-O-methyl ribonucleotide
  modified_base 100: mod_base = OTHER; note = 2'-O-methyl ribonucleotide
  modified_base 101: mod_base = OTHER; note = uniform ribonucleotides (A, C, G, inosine or U), deoxynucleotides (A, G, C, inosine or T), ribonebularine, 2'-O-methylnebularine or deoxynebularine
  modified_base 102: mod_base = OTHER; note = uniform ribonucleotides (A, C, G, inosine or U), deoxynucleotides (A, G, C, inosine or T), ribonebularine, 2'-O-methylnebularine or deoxynebularine
  modified_base 103: mod_base = OTHER; note = uniform ribonucleotides (A, C, G, inosine or U), deoxynucleotides (A, G, C, inosine or T), ribonebularine, 2'-O-methylnebularine or deoxynebularine
  modified_base 1..4: mod_base = OTHER; note = phosphorothioate linkage
  modified_base 25..26: mod_base = OTHER; note = phosphorothioate linkage
  modified_base 45..46: mod_base = OTHER; note = phosphorothioate linkage
  modified_base 98..100: mod_base = OTHER; note = phosphorothioate linkage
  misc_feature 1..100: note = RNA
  misc_feature 101..103: note = Optionally DNA or RNA

SEQ ID NO: 3039 - DNA, 103 bp, synthetic construct; identical to SEQ ID NO: 1797
  source 1..103: mol_type = other DNA
  modified_base 1: mod_base = OTHER; note = 2'-O-methyl ribonucleotide
  modified_base 2: mod_base = OTHER; note = 2'-O-methyl ribonucleotide
  modified_base 3: mod_base = OTHER; note = 2'-O-methyl ribonucleotide
  modified_base 21: mod_base = OTHER; note = 2'-O-methyl ribonucleotide
  modified_base 28: mod_base = OTHER; note = 2'-O-methyl ribonucleotide
  modified_base 29: mod_base = OTHER; note = 2'-O-methyl ribonucleotide
  modified_base 30: mod_base = OTHER; note = 2'-O-methyl ribonucleotide
  modified_base 31: mod_base = OTHER; note = 2'-O-methyl ribonucleotide
  modified_base 32: mod_base = OTHER; note = 2'-O-methyl ribonucleotide
  modified_base 34: mod_base = OTHER; note = 2'-O-methyl ribonucleotide
  modified_base 35: mod_base = OTHER; note = 2'-O-methyl ribonucleotide
  modified_base 36: mod_base = OTHER; note = 2'-O-methyl ribonucleotide
  modified_base 37: mod_base = OTHER; note = 2'-O-methyl ribonucleotide
  modified_base 38: mod_base = OTHER; note = 2'-O-methyl ribonucleotide
  modified_base 39: mod_base = OTHER; note = 2'-O-methyl ribonucleotide
  modified_base 40: mod_base = OTHER; note = 2'-O-methyl ribonucleotide
  modified_base 41: mod_base = OTHER; note = 2'-O-methyl ribonucleotide
  modified_base 42: mod_base = OTHER; note = 2'-O-methyl ribonucleotide
  modified_base 46: mod_base = OTHER; note = 2'-O-methyl ribonucleotide
  modified_base 48: mod_base = OTHER; note = 2'-O-methyl ribonucleotide
  modified_base 50: mod_base = OTHER; note = 2'-O-methyl ribonucleotide
  modified_base 52: mod_base = OTHER; note = 2'-O-methyl ribonucleotide
  modified_base 53: mod_base = OTHER; note = 2'-O-methyl ribonucleotide
  modified_base 54: mod_base = OTHER; note = 2'-O-methyl ribonucleotide
  modified_base 55: mod_base = OTHER; note = 2'-O-methyl ribonucleotide
  modified_base 56: mod_base = OTHER; note = 2'-O-methyl ribonucleotide
  modified_base 57: mod_base = OTHER; note = 2'-O-methyl ribonucleotide
  modified_base 60: mod_base = OTHER; note = 2'-O-methyl ribonucleotide
  modified_base 61: mod_base = OTHER; note = 2'-O-methyl ribonucleotide
  modified_base 66: mod_base = OTHER; note = 2'-O-methyl ribonucleotide
  modified_base 67: mod_base = OTHER; note = 2'-O-methyl ribonucleotide
  modified_base 70: mod_base = OTHER; note = 2'-O-methyl ribonucleotide
  modified_base 71: mod_base = OTHER; note = 2'-O-methyl ribonucleotide
  modified_base 72: mod_base = OTHER; note = 2'-O-methyl ribonucleotide
  modified_base 74: mod_base = OTHER; note = 2'-O-methyl ribonucleotide
  modified_base 75: mod_base = OTHER; note = 2'-O-methyl ribonucleotide
  modified_base 76: mod_base = OTHER; note = 2'-O-methyl ribonucleotide
  modified_base 77: mod_base = OTHER; note = 2'-O-methyl ribonucleotide
  modified_base 78: mod_base = OTHER; note = 2'-O-methyl ribonucleotide
  modified_base 79: mod_base = OTHER; note = 2'-O-methyl ribonucleotide
  modified_base 80: mod_base = OTHER; note = 2'-O-methyl ribonucleotide
  modified_base 82: mod_base = OTHER; note = 2'-O-methyl ribonucleotide
  modified_base 83: mod_base = OTHER; note = 2'-O-methyl ribonucleotide
  modified_base 84: mod_base = OTHER; note = 2'-O-methyl ribonucleotide
  modified_base 85: mod_base = OTHER; note = 2'-O-methyl ribonucleotide
  modified_base 86: mod_base = OTHER; note = 2'-O-methyl ribonucleotide
  modified_base 87: mod_base = OTHER; note = 2'-O-methyl ribonucleotide
  modified_base 89: mod_base = OTHER; note = 2'-O-methyl ribonucleotide
  modified_base 92: mod_base = OTHER; note = 2'-O-methyl ribonucleotide
  modified_base 93: mod_base = OTHER; note = 2'-O-methyl ribonucleotide
  modified_base 94: mod_base = OTHER; note = 2'-O-methyl ribonucleotide
  modified_base 95: mod_base = OTHER; note = 2'-O-methyl ribonucleotide
  modified_base 96: mod_base = OTHER; note = 2'-O-methyl ribonucleotide
  modified_base 97: mod_base = OTHER; note = 2'-O-methyl ribonucleotide
  modified_base 98: mod_base = OTHER; note = 2'-O-methyl ribonucleotide
  modified_base 99: mod_base = OTHER; note = 2'-O-methyl ribonucleotide
  modified_base 100: mod_base = OTHER; note = 2'-O-methyl ribonucleotide
  modified_base 101: mod_base = OTHER; note = uniform ribonucleotides (A, C, G, inosine or U), deoxynucleotides (A, G, C, inosine or T), ribonebularine, 2'-O-methylnebularine or deoxynebularine
  modified_base 102: mod_base = OTHER; note = uniform ribonucleotides (A, C, G, inosine or U), deoxynucleotides (A, G, C, inosine or T), ribonebularine, 2'-O-methylnebularine or deoxynebularine
  modified_base 103: mod_base = OTHER; note = uniform ribonucleotides (A, C, G, inosine or U), deoxynucleotides (A, G, C, inosine or T), ribonebularine, 2'-O-methylnebularine or deoxynebularine
  modified_base 1..4: mod_base = OTHER; note = phosphorothioate linkage
  modified_base 25..26: mod_base = OTHER; note = phosphorothioate linkage
  modified_base 45..46: mod_base = OTHER; note = phosphorothioate linkage
  modified_base 98..100: mod_base = OTHER; note = phosphorothioate linkage
  misc_feature 1..100: note = RNA
  misc_feature 101..103: note = Optionally DNA or RNA

SEQ ID NO: 3040 - DNA, 103 bp, synthetic construct; identical to SEQ ID NO: 1795
  source 1..103: mol_type = other DNA
  modified_base 1: mod_base = OTHER; note = 2'-O-methyl ribonucleotide
  modified_base 2: mod_base = OTHER; note = 2'-O-methyl ribonucleotide
  modified_base 3: mod_base = OTHER; note = 2'-O-methyl ribonucleotide
  modified_base 21: mod_base = OTHER; note = 2'-O-methyl ribonucleotide
  modified_base 28: mod_base = OTHER; note = 2'-O-methyl ribonucleotide
  modified_base 29: mod_base = OTHER; note = 2'-O-methyl ribonucleotide
  modified_base 30: mod_base = OTHER; note = 2'-O-methyl ribonucleotide
  modified_base 31: mod_base = OTHER; note = 2'-O-methyl ribonucleotide
  modified_base 32: mod_base = OTHER; note = 2'-O-methyl ribonucleotide
  modified_base 33: mod_base = OTHER; note = 2'-O-methyl ribonucleotide
  modified_base 34: mod_base = OTHER; note = 2'-O-methyl ribonucleotide
  modified_base 35: mod_base = OTHER; note = 2'-O-methyl ribonucleotide
  modified_base 36: mod_base = OTHER; note = 2'-O-methyl ribonucleotide
  modified_base 37: mod_base = OTHER; note = 2'-O-methyl ribonucleotide
  modified_base 38: mod_base = OTHER; note = 2'-O-methyl ribonucleotide
  modified_base 39: mod_base = OTHER; note = 2'-O-methyl ribonucleotide
  modified_base 40: mod_base = OTHER; note = 2'-O-methyl ribonucleotide
  modified_base 41: mod_base = OTHER; note = 2'-O-methyl ribonucleotide
  modified_base 42: mod_base = OTHER; note = 2'-O-methyl ribonucleotide
  modified_base 46: mod_base = OTHER; note = 2'-O-methyl ribonucleotide
  modified_base 48: mod_base = OTHER; note = 2'-O-methyl ribonucleotide
  modified_base 50: mod_base = OTHER; note = 2'-O-methyl ribonucleotide
  modified_base 52: mod_base = OTHER; note = 2'-O-methyl ribonucleotide
  modified_base 53: mod_base = OTHER; note = 2'-O-methyl ribonucleotide
  modified_base 54: mod_base = OTHER; note = 2'-O-methyl ribonucleotide
  modified_base 55: mod_base = OTHER; note = 2'-O-methyl ribonucleotide
  modified_base 56: mod_base = OTHER; note = 2'-O-methyl ribonucleotide
  modified_base 57: mod_base = OTHER; note = 2'-O-methyl ribonucleotide
  modified_base 60: mod_base = OTHER; note = 2'-O-methyl ribonucleotide
  modified_base 61: mod_base = OTHER; note = 2'-O-methyl ribonucleotide
  modified_base 66: mod_base = OTHER; note = 2'-O-methyl ribonucleotide
  modified_base 67: mod_base = OTHER; note = 2'-O-methyl ribonucleotide
  modified_base 70: mod_base = OTHER; note = 2'-O-methyl ribonucleotide
  modified_base 71: mod_base = OTHER; note = 2'-O-methyl ribonucleotide
  modified_base 72: mod_base = OTHER; note = 2'-O-methyl ribonucleotide
  modified_base 73: mod_base = OTHER; note = 2'-O-methyl ribonucleotide
  modified_base 74: mod_base = OTHER; note = 2'-O-methyl ribonucleotide
  modified_base 75: mod_base = OTHER; note = 2'-O-methyl ribonucleotide
  modified_base 76: mod_base = OTHER; note = 2'-O-methyl ribonucleotide
  modified_base 77: mod_base = OTHER; note = 2'-O-methyl ribonucleotide
  modified_base 78: mod_base = OTHER; note = 2'-O-methyl ribonucleotide
  modified_base 79: mod_base = OTHER; note = 2'-O-methyl ribonucleotide
  modified_base 80: mod_base = OTHER; note = 2'-O-methyl ribonucleotide
  modified_base 81: mod_base = OTHER; note = 2'-O-methyl ribonucleotide
  modified_base 83: mod_base = OTHER; note = 2'-O-methyl ribonucleotide
  modified_base 84: mod_base = OTHER; note = 2'-O-methyl ribonucleotide
  modified_base 85: mod_base = OTHER; note = 2'-O-methyl ribonucleotide
  modified_base 86: mod_base = OTHER; note = 2'-O-methyl ribonucleotide
  modified_base 87: mod_base = OTHER; note = 2'-O-methyl ribonucleotide
  modified_base 88: mod_base = OTHER; note = 2'-O-methyl ribonucleotide
  modified_base 89: mod_base = OTHER; note = 2'-O-methyl ribonucleotide
  modified_base 90: mod_base = OTHER; note = 2'-O-methyl ribonucleotide
  modified_base 91: mod_base = OTHER; note = 2'-O-methyl ribonucleotide
  modified_base 92: mod_base = OTHER; note = 2'-O-methyl ribonucleotide
  modified_base 93: mod_base = OTHER; note = 2'-O-methyl ribonucleotide
  modified_base 94: mod_base = OTHER; note = 2'-O-methyl ribonucleotide
  modified_base 95: mod_base = OTHER; note = 2'-O-methyl ribonucleotide
  modified_base 96: mod_base = OTHER; note = 2'-O-methyl ribonucleotide
  modified_base 97: mod_base = OTHER; note = 2'-O-methyl ribonucleotide
  modified_base 98: mod_base = OTHER; note = 2'-O-methyl ribonucleotide
  modified_base 99: mod_base = OTHER; note = 2'-O-methyl ribonucleotide
  modified_base 100: mod_base = OTHER; note = 2'-O-methyl ribonucleotide
  modified_base 101: mod_base = OTHER; note = uniform ribonucleotides (A, C, G, inosine or U), deoxynucleotides (A, G, C, inosine or T), ribonebularine, 2'-O-methylnebularine or deoxynebularine
  modified_base 102: mod_base = OTHER; note = uniform ribonucleotides (A, C, G, inosine or U), deoxynucleotides (A, G, C, inosine or T), ribonebularine, 2'-O-methylnebularine or deoxynebularine
  modified_base 103: mod_base = OTHER; note = uniform ribonucleotides (A, C, G, inosine or U), deoxynucleotides (A, G, C, inosine or T), ribonebularine, 2'-O-methylnebularine or deoxynebularine
  modified_base 1..4: mod_base = OTHER; note = phosphorothioate linkage
  modified_base 25..26: mod_base = OTHER; note = phosphorothioate linkage
  modified_base 64..65: mod_base = OTHER; note = phosphorothioate linkage
  modified_base 98..100: mod_base = OTHER; note = phosphorothioate linkage
  misc_feature 1..100: note = RNA
  misc_feature 101..103: note = Optionally DNA or RNA

SEQ ID NO: 3041 - DNA, 103 bp, synthetic construct; identical to SEQ ID NO: 1795
  source 1..103: mol_type = other DNA
  modified_base 1: mod_base = OTHER; note = 2'-O-methyl ribonucleotide
  modified_base 2: mod_base = OTHER; note = 2'-O-methyl ribonucleotide
  modified_base 3: mod_base = OTHER; note = 2'-O-methyl ribonucleotide
  modified_base 21: mod_base = OTHER; note = 2'-O-methyl ribonucleotide
  modified_base 28: mod_base = OTHER; note = 2'-O-methyl ribonucleotide
  modified_base 29: mod_base = OTHER; note = 2'-O-methyl ribonucleotide
  modified_base 30: mod_base = OTHER; note = 2'-O-methyl ribonucleotide
  modified_base 31: mod_base = OTHER; note = 2'-O-methyl ribonucleotide
  modified_base 32: mod_base = OTHER; note = 2'-O-methyl ribonucleotide
  modified_base 34: mod_base = OTHER; note = 2'-O-methyl ribonucleotide
  modified_base 35: mod_base = OTHER; note = 2'-O-methyl ribonucleotide
  modified_base 36: mod_base = OTHER; note = 2'-O-methyl ribonucleotide
  modified_base 37: mod_base = OTHER; note = 2'-O-methyl ribonucleotide
  modified_base 38: mod_base = OTHER; note = 2'-O-methyl ribonucleotide
  modified_base 39: mod_base = OTHER; note = 2'-O-methyl ribonucleotide
  modified_base 40: mod_base = OTHER; note = 2'-O-methyl ribonucleotide
  modified_base 41: mod_base = OTHER; note = 2'-O-methyl ribonucleotide
  modified_base 42: mod_base = OTHER; note = 2'-O-methyl ribonucleotide
  modified_base 46: mod_base = OTHER; note = 2'-O-methyl ribonucleotide
  modified_base 48: mod_base = OTHER; note = 2'-O-methyl ribonucleotide
  modified_base 50: mod_base = OTHER; note = 2'-O-methyl ribonucleotide
  modified_base 52: mod_base = OTHER; note = 2'-O-methyl ribonucleotide
  modified_base 53: mod_base = OTHER; note = 2'-O-methyl ribonucleotide
  modified_base 54: mod_base = OTHER; note = 2'-O-methyl ribonucleotide
  modified_base 55: mod_base = OTHER; note = 2'-O-methyl ribonucleotide
  modified_base 56: mod_base = OTHER; note = 2'-O-methyl ribonucleotide
  modified_base 57: mod_base = OTHER; note = 2'-O-methyl ribonucleotide
  modified_base 60: mod_base = OTHER; note = 2'-O-methyl ribonucleotide
  modified_base 61: mod_base = OTHER; note = 2'-O-methyl ribonucleotide
  modified_base 66: mod_base = OTHER; note = 2'-O-methyl ribonucleotide
  modified_base 67: mod_base = OTHER; note = 2'-O-methyl ribonucleotide
  modified_base 70: mod_base = OTHER; note = 2'-O-methyl ribonucleotide
  modified_base 71: mod_base = OTHER; note = 2'-O-methyl ribonucleotide
  modified_base 72: mod_base = OTHER; note = 2'-O-methyl ribonucleotide
  modified_base 74: mod_base = OTHER; note = 2'-O-methyl ribonucleotide
  modified_base 75: mod_base = OTHER; note = 2'-O-methyl ribonucleotide
  modified_base 76: mod_base = OTHER; note = 2'-O-methyl ribonucleotide
  modified_base 77: mod_base = OTHER; note = 2'-O-methyl ribonucleotide
  modified_base 78: mod_base = OTHER; note = 2'-O-methyl ribonucleotide
  modified_base 79: mod_base = OTHER; note = 2'-O-methyl ribonucleotide
  modified_base 80: mod_base = OTHER; note = 2'-O-methyl ribonucleotide
  modified_base 81: mod_base = OTHER; note = 2'-O-methyl ribonucleotide
  modified_base 83: mod_base = OTHER; note = 2'-O-methyl ribonucleotide
  modified_base 84: mod_base = OTHER; note = 2'-O-methyl ribonucleotide
  modified_base 85: mod_base = OTHER; note = 2'-O-methyl ribonucleotide
  modified_base 86: mod_base = OTHER; note = 2'-O-methyl ribonucleotide
  modified_base 87: mod_base = OTHER; note = 2'-O-methyl ribonucleotide
  modified_base 88: mod_base = OTHER; note = 2'-O-methyl ribonucleotide
  modified_base 89: mod_base = OTHER; note = 2'-O-methyl ribonucleotide
  modified_base 90: mod_base = OTHER; note = 2'-O-methyl ribonucleotide
  modified_base 91: mod_base = OTHER; note = 2'-O-methyl ribonucleotide
  modified_base 92: mod_base = OTHER; note = 2'-O-methyl ribonucleotide
  modified_base 93: mod_base = OTHER; note = 2'-O-methyl ribonucleotide
  modified_base 94: mod_base = OTHER; note = 2'-O-methyl ribonucleotide
  modified_base 95: mod_base = OTHER; note = 2'-O-methyl ribonucleotide
  modified_base 96: mod_base = OTHER; note = 2'-O-methyl ribonucleotide
  modified_base 97: mod_base = OTHER; note = 2'-O-methyl ribonucleotide
  modified_base 98: mod_base = OTHER; note = 2'-O-methyl ribonucleotide
  modified_base 99: mod_base = OTHER; note = 2'-O-methyl ribonucleotide
  modified_base 100: mod_base = OTHER; note = 2'-O-methyl ribonucleotide
  modified_base 101: mod_base = OTHER; note = uniform ribonucleotides (A, C, G, inosine or U), deoxynucleotides (A, G, C, inosine or T), ribonebularine, 2'-O-methylnebularine or deoxynebularine
  modified_base 102: mod_base = OTHER; note = uniform ribonucleotides (A, C, G, inosine or U), deoxynucleotides (A, G, C, inosine or T), ribonebularine, 2'-O-methylnebularine or deoxynebularine
  modified_base 103: mod_base = OTHER; note = uniform ribonucleotides (A, C, G, inosine or U), deoxynucleotides (A, G, C, inosine or T), ribonebularine, 2'-O-methylnebularine or deoxynebularine
  modified_base 1..4: mod_base = OTHER; note = phosphorothioate linkage
  modified_base 25..26: mod_base = OTHER; note = phosphorothioate linkage
  modified_base 64..65: mod_base = OTHER; note = phosphorothioate linkage
  modified_base 98..100: mod_base = OTHER; note = phosphorothioate linkage
  misc_feature 1..100: note = RNA
  misc_feature 101..103: note = Optionally DNA or RNA

SEQ ID NO: 3042 - DNA, 103 bp, synthetic construct; identical to SEQ ID NO: 1796
  source 1..103: mol_type = other DNA
  modified_base 1: mod_base = OTHER; note = 2'-O-methyl ribonucleotide
  modified_base 2: mod_base = OTHER; note = 2'-O-methyl ribonucleotide
  modified_base 3: mod_base = OTHER; note = 2'-O-methyl ribonucleotide
  modified_base 21: mod_base = OTHER; note = 2'-O-methyl ribonucleotide
  modified_base 28: mod_base = OTHER; note = 2'-O-methyl ribonucleotide
  modified_base 29: mod_base = OTHER; note = 2'-O-methyl ribonucleotide
  modified_base 30: mod_base = OTHER; note = 2'-O-methyl ribonucleotide
  modified_base 31: mod_base = OTHER; note = 2'-O-methyl ribonucleotide
  modified_base 32: mod_base = OTHER; note = 2'-O-methyl ribonucleotide
  modified_base 33: mod_base = OTHER; note = 2'-O-methyl ribonucleotide
  modified_base 34: mod_base = OTHER; note = 2'-O-methyl ribonucleotide
  modified_base 35: mod_base = OTHER; note = 2'-O-methyl ribonucleotide
  modified_base 36: mod_base = OTHER; note = 2'-O-methyl ribonucleotide
  modified_base 37: mod_base = OTHER; note = 2'-O-methyl ribonucleotide
  modified_base 38: mod_base = OTHER; note = 2'-O-methyl ribonucleotide
  modified_base 39: mod_base = OTHER; note = 2'-O-methyl ribonucleotide
  modified_base 40: mod_base = OTHER; note = 2'-O-methyl ribonucleotide
  modified_base 41: mod_base = OTHER; note = 2'-O-methyl ribonucleotide
  modified_base 42: mod_base = OTHER; note = 2'-O-methyl ribonucleotide
  modified_base 46: mod_base = OTHER; note = 2'-O-methyl ribonucleotide
  modified_base 48: mod_base = OTHER; note = 2'-O-methyl ribonucleotide
  modified_base 50: mod_base = OTHER; note = 2'-O-methyl ribonucleotide
  modified_base 52: mod_base = OTHER; note = 2'-O-methyl ribonucleotide
  modified_base 53: mod_base = OTHER; note = 2'-O-methyl ribonucleotide
  modified_base 54: mod_base = OTHER; note = 2'-O-methyl ribonucleotide
  modified_base 55: mod_base = OTHER; note = 2'-O-methyl ribonucleotide
  modified_base 56: mod_base = OTHER; note = 2'-O-methyl ribonucleotide
  modified_base 57: mod_base = OTHER; note = 2'-O-methyl ribonucleotide
  modified_base 60: mod_base = OTHER; note = 2'-O-methyl ribonucleotide
  modified_base 61: mod_base = OTHER; note = 2'-O-methyl ribonucleotide
  modified_base 66: mod_base = OTHER; note = 2'-O-methyl ribonucleotide
  modified_base 67: mod_base = OTHER; note = 2'-O-methyl ribonucleotide
  modified_base 70: mod_base = OTHER; note = 2'-O-methyl ribonucleotide
  modified_base 71: mod_base = OTHER; note = 2'-O-methyl ribonucleotide
  modified_base 72: mod_base = OTHER; note = 2'-O-methyl ribonucleotide
  modified_base 73: mod_base = OTHER; note = 2'-O-methyl ribonucleotide
  modified_base 74: mod_base = OTHER; note = 2'-O-methyl ribonucleotide
  modified_base 75: mod_base = OTHER; note = 2'-O-methyl ribonucleotide
  modified_base 76: mod_base = OTHER; note = 2'-O-methyl ribonucleotide
  modified_base 77: mod_base = OTHER; note = 2'-O-methyl ribonucleotide
  modified_base 78: mod_base = OTHER; note = 2'-O-methyl ribonucleotide
  modified_base 79: mod_base = OTHER; note = 2'-O-methyl ribonucleotide
  modified_base 80: mod_base = OTHER; note = 2'-O-methyl ribonucleotide
  modified_base 81: mod_base = OTHER; note = 2'-O-methyl ribonucleotide
  modified_base 83: mod_base = OTHER; note = 2'-O-methyl ribonucleotide
  modified_base 84: mod_base = OTHER; note = 2'-O-methyl ribonucleotide
  modified_base 85: mod_base = OTHER; note = 2'-O-methyl ribonucleotide
  modified_base 86: mod_base = OTHER; note = 2'-O-methyl ribonucleotide
  modified_base 87: mod_base = OTHER; note = 2'-O-methyl ribonucleotide
  modified_base 88: mod_base = OTHER; note = 2'-O-methyl ribonucleotide
  modified_base 89: mod_base = OTHER; note = 2'-O-methyl ribonucleotide
  modified_base 90: mod_base = OTHER; note = 2'-O-methyl ribonucleotide
  modified_base 91: mod_base = OTHER; note = 2'-O-methyl ribonucleotide
  modified_base 92: mod_base = OTHER; note = 2'-O-methyl ribonucleotide
  modified_base 93: mod_base = OTHER; note = 2'-O-methyl ribonucleotide
  modified_base 94: mod_base = OTHER; note = 2'-O-methyl ribonucleotide
  modified_base 95: mod_base = OTHER; note = 2'-O-methyl ribonucleotide
  modified_base 96: mod_base = OTHER; note = 2'-O-methyl ribonucleotide
  modified_base 97: mod_base = OTHER; note = 2'-O-methyl ribonucleotide
  modified_base 98: mod_base = OTHER; note = 2'-O-methyl ribonucleotide
  modified_base 99: mod_base = OTHER; note = 2'-O-methyl ribonucleotide
  modified_base 100: mod_base = OTHER; note = 2'-O-methyl ribonucleotide
  modified_base 101: mod_base = OTHER; note = uniform ribonucleotides (A, C, G, inosine or U), deoxynucleotides (A, G, C, inosine or T), ribonebularine, 2'-O-methylnebularine or deoxynebularine
  modified_base 102: mod_base = OTHER; note = uniform ribonucleotides (A, C, G, inosine or U), deoxynucleotides (A, G, C, inosine or T), ribonebularine, 2'-O-methylnebularine or deoxynebularine
  modified_base 103: mod_base = OTHER; note = uniform ribonucleotides (A, C, G, inosine or U), deoxynucleotides (A, G, C, inosine or T), ribonebularine, 2'-O-methylnebularine or deoxynebularine
  modified_base 1..4: mod_base = OTHER; note = phosphorothioate linkage
  modified_base 25..26: mod_base = OTHER; note = phosphorothioate linkage
  modified_base 64..65: mod_base = OTHER; note = phosphorothioate linkage
  modified_base 98..100: mod_base = OTHER; note = phosphorothioate linkage
  misc_feature 1..100: note = RNA
  misc_feature 101..103: note = Optionally DNA or RNA

SEQ ID NO: 3043 - DNA, 103 bp, synthetic construct; identical to SEQ ID NO: 1796
  source 1..103: mol_type = other DNA
  modified_base 1: mod_base = OTHER; note = 2'-O-methyl ribonucleotide
  modified_base 2: mod_base = OTHER; note = 2'-O-methyl ribonucleotide
  modified_base 3: mod_base = OTHER; note = 2'-O-methyl ribonucleotide
  modified_base 21: mod_base = OTHER; note = 2'-O-methyl ribonucleotide
  modified_base 28: mod_base = OTHER; note = 2'-O-methyl ribonucleotide
  modified_base 29: mod_base = OTHER; note = 2'-O-methyl ribonucleotide
  modified_base 30: mod_base = OTHER; note = 2'-O-methyl ribonucleotide
  modified_base 31: mod_base = OTHER; note = 2'-O-methyl ribonucleotide
  modified_base 32: mod_base = OTHER; note = 2'-O-methyl ribonucleotide
  modified_base 34: mod_base = OTHER; note = 2'-O-methyl ribonucleotide
  modified_base 35: mod_base = OTHER; note = 2'-O-methyl ribonucleotide
  modified_base 36: mod_base = OTHER; note = 2'-O-methyl ribonucleotide
  modified_base 37: mod_base = OTHER; note = 2'-O-methyl ribonucleotide
  modified_base 38: mod_base = OTHER; note = 2'-O-methyl ribonucleotide
  modified_base 39: mod_base = OTHER; note = 2'-O-methyl ribonucleotide
  modified_base 40: mod_base = OTHER; note = 2'-O-methyl ribonucleotide
  modified_base 41: mod_base = OTHER; note = 2'-O-methyl ribonucleotide
  modified_base 42: mod_base = OTHER; note = 2'-O-methyl ribonucleotide
  modified_base 46: mod_base = OTHER; note = 2'-O-methyl ribonucleotide
  modified_base 48: mod_base = OTHER; note = 2'-O-methyl ribonucleotide
  modified_base 50: mod_base = OTHER; note = 2'-O-methyl ribonucleotide
  modified_base 52: mod_base = OTHER; note = 2'-O-methyl ribonucleotide
  modified_base 53: mod_base = OTHER; note = 2'-O-methyl ribonucleotide
  modified_base 54: mod_base = OTHER; note = 2'-O-methyl ribonucleotide
  modified_base 55: mod_base = OTHER; note = 2'-O-methyl ribonucleotide
  modified_base 56: mod_base = OTHER; note = 2'-O-methyl ribonucleotide
  modified_base 57: mod_base = OTHER; note = 2'-O-methyl ribonucleotide
  modified_base 60: mod_base = OTHER; note = 2'-O-methyl ribonucleotide
  modified_base 61: mod_base = OTHER; note = 2'-O-methyl ribonucleotide
  modified_base 66: mod_base = OTHER; note = 2'-O-methyl ribonucleotide
  modified_base 67: mod_base = OTHER; note = 2'-O-methyl ribonucleotide
  modified_base 70: mod_base = OTHER; note = 2'-O-methyl ribonucleotide
  modified_base 71: mod_base = OTHER; note = 2'-O-methyl ribonucleotide
  modified_base 72: mod_base = OTHER; note = 2'-O-methyl ribonucleotide
  modified_base 74: mod_base = OTHER; note = 2'-O-methyl ribonucleotide
  modified_base 75: mod_base = OTHER; note = 2'-O-methyl ribonucleotide
  modified_base 76: mod_base = OTHER; note = 2'-O-methyl ribonucleotide
  modified_base 77: mod_base = OTHER; note = 2'-O-methyl ribonucleotide
  modified_base 78: mod_base = OTHER; note = 2'-O-methyl ribonucleotide
  modified_base 79: mod_base = OTHER; note = 2'-O-methyl ribonucleotide
  modified_base 80: mod_base = OTHER; note = 2'-O-methyl ribonucleotide
  modified_base 81: mod_base = OTHER; note = 2'-O-methyl ribonucleotide
  modified_base 83: mod_base = OTHER; note = 2'-O-methyl ribonucleotide
  modified_base 84: mod_base = OTHER; note = 2'-O-methyl ribonucleotide
  modified_base 85: mod_base = OTHER; note = 2'-O-methyl ribonucleotide
  modified_base 86: mod_base = OTHER; note = 2'-O-methyl ribonucleotide
  modified_base 87: mod_base = OTHER; note = 2'-O-methyl ribonucleotide
  modified_base 88: mod_base = OTHER; note = 2'-O-methyl ribonucleotide
  modified_base 89: mod_base = OTHER; note = 2'-O-methyl ribonucleotide
  modified_base 90: mod_base = OTHER; note = 2'-O-methyl ribonucleotide
  modified_base 91: mod_base = OTHER; note = 2'-O-methyl ribonucleotide
  modified_base 92: mod_base = OTHER; note = 2'-O-methyl ribonucleotide
  modified_base 93: mod_base = OTHER; note = 2'-O-methyl ribonucleotide
  modified_base 94: mod_base = OTHER; note = 2'-O-methyl ribonucleotide
  modified_base 95: mod_base = OTHER; note = 2'-O-methyl ribonucleotide
  modified_base 96: mod_base = OTHER; note = 2'-O-methyl ribonucleotide
  modified_base 97: mod_base = OTHER; note = 2'-O-methyl ribonucleotide
  modified_base 98: mod_base = OTHER; note = 2'-O-methyl ribonucleotide
  modified_base 99: mod_base = OTHER; note = 2'-O-methyl ribonucleotide
  modified_base 100: mod_base = OTHER; note = 2'-O-methyl ribonucleotide
  modified_base 101: mod_base = OTHER; note = uniform ribonucleotides (A, C, G, inosine or U), deoxynucleotides (A, G, C, inosine or T), ribonebularine, 2'-O-methylnebularine or deoxynebularine
  modified_base 102: mod_base = OTHER; note = uniform ribonucleotides (A, C, G, inosine or U), deoxynucleotides (A, G, C, inosine or T), ribonebularine, 2'-O-methylnebularine or deoxynebularine
  modified_base 103: mod_base = OTHER; note = uniform ribonucleotides (A, C, G, inosine or U), deoxynucleotides (A, G, C, inosine or T), ribonebularine, 2'-O-methylnebularine or deoxynebularine
  modified_base 1..4: mod_base = OTHER; note = phosphorothioate linkage
  modified_base 25..26: mod_base = OTHER; note = phosphorothioate linkage
  modified_base 64..65: mod_base = OTHER; note = phosphorothioate linkage
  modified_base 98..100: mod_base = OTHER; note = phosphorothioate linkage
  misc_feature 1..100: note = RNA
  misc_feature 101..103: note = Optionally DNA or RNA

SEQ ID NO: 3044 - DNA, 103 bp, synthetic construct; identical to SEQ ID NO: 1797
  source 1..103: mol_type = other DNA
  modified_base 1: mod_base = OTHER; note = 2'-O-methyl ribonucleotide
  modified_base 2: mod_base = OTHER; note = 2'-O-methyl ribonucleotide
  modified_base 3: mod_base = OTHER; note = 2'-O-methyl ribonucleotide
  modified_base 21: mod_base = OTHER; note = 2'-O-methyl ribonucleotide
  modified_base 28: mod_base = OTHER; note = 2'-O-methyl ribonucleotide
  modified_base 29: mod_base = OTHER; note = 2'-O-methyl ribonucleotide
  modified_base 30: mod_base = OTHER; note = 2'-O-methyl ribonucleotide
  modified_base 31: mod_base = OTHER; note = 2'-O-methyl ribonucleotide
  modified_base 32: mod_base = OTHER; note = 2'-O-methyl ribonucleotide
  modified_base 33: mod_base = OTHER; note = 2'-O-methyl ribonucleotide
  modified_base 34: mod_base = OTHER; note = 2'-O-methyl ribonucleotide
  modified_base 35: mod_base = OTHER; note = 2'-O-methyl ribonucleotide
  modified_base 36: mod_base = OTHER; note = 2'-O-methyl ribonucleotide
  modified_base 37: mod_base = OTHER; note = 2'-O-methyl ribonucleotide
  modified_base 38: mod_base = OTHER; note = 2'-O-methyl ribonucleotide
  modified_base 39: mod_base = OTHER; note = 2'-O-methyl ribonucleotide
  modified_base 40: mod_base = OTHER; note = 2'-O-methyl ribonucleotide
  modified_base 41: mod_base = OTHER; note = 2'-O-methyl ribonucleotide
  modified_base 42: mod_base = OTHER; note = 2'-O-methyl ribonucleotide
  modified_base 46: mod_base = OTHER; note = 2'-O-methyl ribonucleotide
  modified_base 48: mod_base = OTHER; note = 2'-O-methyl ribonucleotide
  modified_base 50: mod_base = OTHER; note = 2'-O-methyl ribonucleotide
  modified_base 52: mod_base = OTHER; note = 2'-O-methyl ribonucleotide
  modified_base 53: mod_base = OTHER; note = 2'-O-methyl ribonucleotide
  modified_base 54: mod_base = OTHER; note = 2'-O-methyl ribonucleotide
  modified_base 57: mod_base = OTHER; note = 2'-O-methyl ribonucleotide
  modified_base 61: mod_base = OTHER; note = 2'-O-methyl ribonucleotide
  modified_base 66: mod_base = OTHER; note = 2'-O-methyl ribonucleotide
  modified_base 67: mod_base = OTHER; note = 2'-O-methyl ribonucleotide
  modified_base 70: mod_base = OTHER; note = 2'-O-methyl ribonucleotide
  modified_base 71: mod_base = OTHER; note = 2'-O-methyl ribonucleotide
  modified_base 72: mod_base = OTHER; note = 2'-O-methyl ribonucleotide
  modified_base 74: mod_base = OTHER; note = 2'-O-methyl ribonucleotide
  modified_base 75: mod_base = OTHER; note = 2'-O-methyl ribonucleotide
  modified_base 76: mod_base = OTHER; note = 2'-O-methyl ribonucleotide
  modified_base 77: mod_base = OTHER; note = 2'-O-methyl ribonucleotide
  modified_base 78: mod_base = OTHER; note = 2'-O-methyl ribonucleotide
  modified_base 79: mod_base = OTHER; note = 2'-O-methyl ribonucleotide
  modified_base 80: mod_base = OTHER; note = 2'-O-methyl ribonucleotide
  modified_base 82: mod_base = OTHER; note = 2'-O-methyl ribonucleotide
  modified_base 83: mod_base = OTHER; note = 2'-O-methyl ribonucleotide
  modified_base 84: mod_base = OTHER; note = 2'-O-methyl ribonucleotide
  modified_base 85: mod_base = OTHER; note = 2'-O-methyl ribonucleotide
  modified_base 86: mod_base = OTHER; note = 2'-O-methyl ribonucleotide
  modified_base 87: mod_base = OTHER; note = 2'-O-methyl ribonucleotide
  modified_base 89: mod_base = OTHER; note = 2'-O-methyl ribonucleotide
  modified_base 92: mod_base = OTHER; note = 2'-O-methyl ribonucleotide
  modified_base 93: mod_base = OTHER; note = 2'-O-methyl ribonucleotide
  modified_base 94: mod_base = OTHER; note = 2'-O-methyl ribonucleotide
  modified_base 95: mod_base = OTHER; note = 2'-O-methyl ribonucleotide
  modified_base 96: mod_base = OTHER; note = 2'-O-methyl ribonucleotide
  modified_base 97: mod_base = OTHER; note = 2'-O-methyl ribonucleotide
  modified_base 98: mod_base = OTHER; note = 2'-O-methyl ribonucleotide
  modified_base 99: mod_base = OTHER; note = 2'-O-methyl ribonucleotide
  modified_base 100: mod_base = OTHER; note = 2'-O-methyl ribonucleotide
  modified_base 101: mod_base = OTHER; note = uniform ribonucleotides (A, C, G, inosine or U), deoxynucleotides (A, G, C, inosine or T), ribonebularine, 2'-O-methylnebularine or deoxynebularine
  modified_base 102: mod_base = OTHER; note = uniform ribonucleotides (A, C, G, inosine or U), deoxynucleotides (A, G, C, inosine or T), ribonebularine, 2'-O-methylnebularine or deoxynebularine
  modified_base 103: mod_base = OTHER; note = uniform ribonucleotides (A, C, G, inosine or U), deoxynucleotides (A, G, C, inosine or T), ribonebularine, 2'-O-methylnebularine or deoxynebularine
  modified_base 1..4: mod_base = OTHER; note = phosphorothioate linkage
  modified_base 25..26: mod_base = OTHER; note = phosphorothioate linkage
  modified_base 64..65: mod_base = OTHER; note = phosphorothioate linkage
  modified_base 98..100: mod_base = OTHER; note = phosphorothioate linkage
  misc_feature 1..100: note = RNA
  misc_feature 101..103: note = Optionally DNA or RNA

SEQ ID NO: 3045 - DNA, 103 bp, synthetic construct; identical to SEQ ID NO: 1797
  source 1..103: mol_type = other DNA
  modified_base 1: mod_base = OTHER; note = 2'-O-methyl ribonucleotide
  modified_base 2: mod_base = OTHER; note = 2'-O-methyl ribonucleotide
  modified_base 3: mod_base = OTHER; note = 2'-O-methyl ribonucleotide
  modified_base 21: mod_base = OTHER; note = 2'-O-methyl ribonucleotide
  modified_base 28: mod_base = OTHER; note = 2'-O-methyl ribonucleotide
  modified_base 29: mod_base = OTHER; note = 2'-O-methyl ribonucleotide
  modified_base 30: mod_base = OTHER; note = 2'-O-methyl ribonucleotide
  modified_base 31: mod_base = OTHER; note = 2'-O-methyl ribonucleotide
  modified_base 32: mod_base = OTHER; note = 2'-O-methyl ribonucleotide
  modified_base 33: mod_base = OTHER; note = 2'-O-methyl ribonucleotide
  modified_base 34: mod_base = OTHER; note = 2'-O-methyl ribonucleotide
  modified_base 35: mod_base = OTHER; note = 2'-O-methyl ribonucleotide
  modified_base 36: mod_base = OTHER; note = 2'-O-methyl ribonucleotide
  modified_base 37: mod_base = OTHER; note = 2'-O-methyl ribonucleotide
  modified_base 38: mod_base = OTHER; note = 2'-O-methyl ribonucleotide
  modified_base 39: mod_base = OTHER; note = 2'-O-methyl ribonucleotide
  modified_base 40: mod_base = OTHER; note = 2'-O-methyl ribonucleotide
  modified_base 41: mod_base = OTHER; note = 2'-O-methyl ribonucleotide
  modified_base 42: mod_base = OTHER; note = 2'-O-methyl ribonucleotide
  modified_base 46: mod_base = OTHER; note = 2'-O-methyl ribonucleotide
  modified_base 48: mod_base = OTHER; note = 2'-O-methyl ribonucleotide
  modified_base 50: mod_base = OTHER; note = 2'-O-methyl ribonucleotide
  modified_base 52: mod_base = OTHER; note = 2'-O-methyl ribonucleotide
  modified_base 53: mod_base = OTHER; note = 2'-O-methyl ribonucleotide
  modified_base 54: mod_base = OTHER; note = 2'-O-methyl ribonucleotide
  modified_base 55: mod_base = OTHER; note = 2'-O-methyl ribonucleotide
  modified_base 56: mod_base = OTHER; note = 2'-O-methyl ribonucleotide
  modified_base 57: mod_base = OTHER; note = 2'-O-methyl ribonucleotide
  modified_base 60: mod_base = OTHER; note = 2'-O-methyl ribonucleotide
  modified_base 61: mod_base = OTHER; note = 2'-O-methyl ribonucleotide
  modified_base 66: mod_base = OTHER; note = 2'-O-methyl ribonucleotide
  modified_base 67: mod_base = OTHER; note = 2'-O-methyl ribonucleotide
  modified_base 70: mod_base = OTHER; note = 2'-O-methyl ribonucleotide
  modified_base 71: mod_base = OTHER; note = 2'-O-methyl ribonucleotide
  modified_base 72: mod_base = OTHER; note = 2'-O-methyl ribonucleotide
  modified_base 74: mod_base = OTHER; note = 2'-O-methyl ribonucleotide
  modified_base 75: mod_base = OTHER; note = 2'-O-methyl ribonucleotide
  modified_base 76: mod_base = OTHER; note = 2'-O-methyl ribonucleotide
  modified_base 77: mod_base = OTHER; note = 2'-O-methyl ribonucleotide
  modified_base 78: mod_base = OTHER; note = 2'-O-methyl ribonucleotide
  modified_base 79: mod_base = OTHER; note = 2'-O-methyl ribonucleotide
  modified_base 80: mod_base = OTHER; note = 2'-O-methyl ribonucleotide
  modified_base 82: mod_base = OTHER; note = 2'-O-methyl ribonucleotide
  modified_base 83: mod_base = OTHER; note = 2'-O-methyl ribonucleotide
  modified_base 84: mod_base = OTHER; note = 2'-O-methyl ribonucleotide
  modified_base 85: mod_base = OTHER; note = 2'-O-methyl ribonucleotide
  modified_base 86: mod_base = OTHER; note = 2'-O-methyl ribonucleotide
  modified_base 87: mod_base = OTHER; note = 2'-O-methyl ribonucleotide
  modified_base 89: mod_base = OTHER; note = 2'-O-methyl ribonucleotide
  modified_base 92: mod_base = OTHER; note = 2'-O-methyl ribonucleotide
  modified_base 93: mod_base = OTHER; note = 2'-O-methyl ribonucleotide
  modified_base 94: mod_base = OTHER; note = 2'-O-methyl ribonucleotide
  modified_base 95: mod_base = OTHER; note = 2'-O-methyl ribonucleotide
  modified_base 96: mod_base = OTHER; note = 2'-O-methyl ribonucleotide
  modified_base 97: mod_base = OTHER; note = 2'-O-methyl ribonucleotide
  modified_base 98: mod_base = OTHER; note = 2'-O-methyl ribonucleotide
  modified_base 99: mod_base = OTHER; note = 2'-O-methyl ribonucleotide
  modified_base 100: mod_base = OTHER; note = 2'-O-methyl ribonucleotide
  modified_base 101: mod_base = OTHER; note = uniform ribonucleotides (A, C, G, inosine or U), deoxynucleotides (A, G, C, inosine or T), ribonebularine, 2'-O-methylnebularine or deoxynebularine
  modified_base 102: mod_base = OTHER; note = uniform ribonucleotides (A, C, G, inosine or U), deoxynucleotides (A, G, C, inosine or T), ribonebularine, 2'-O-methylnebularine or deoxynebularine
  modified_base 103: mod_base = OTHER; note = uniform ribonucleotides (A, C, G, inosine or U), deoxynucleotides (A, G, C, inosine or T), ribonebularine, 2'-O-methylnebularine or deoxynebularine
  modified_base 1..4: mod_base = OTHER; note = phosphorothioate linkage
  modified_base 25..26: mod_base = OTHER; note = phosphorothioate linkage
  modified_base 64..65: mod_base = OTHER; note = phosphorothioate linkage
  modified_base 98..100: mod_base = OTHER; note = phosphorothioate linkage
  misc_feature 1..100: note = RNA
  misc_feature 101..103: note = Optionally DNA or RNA

SEQ ID NO: 3046 - DNA, 103 bp, synthetic construct; identical to SEQ ID NO: 1797
  source 1..103: mol_type = other DNA
  modified_base 1: mod_base = OTHER; note = 2'-O-methyl ribonucleotide
  modified_base 2: mod_base = OTHER; note = 2'-O-methyl ribonucleotide
  modified_base 3: mod_base = OTHER; note = 2'-O-methyl ribonucleotide
  modified_base 21: mod_base = OTHER; note = 2'-O-methyl ribonucleotide
  modified_base 28: mod_base = OTHER; note = 2'-O-methyl ribonucleotide
  modified_base 29: mod_base = OTHER; note = 2'-O-methyl ribonucleotide
  modified_base 30: mod_base = OTHER; note = 2'-O-methyl ribonucleotide
  modified_base 31: mod_base = OTHER; note = 2'-O-methyl ribonucleotide
  modified_base 32: mod_base = OTHER; note = 2'-O-methyl ribonucleotide
  modified_base 33: mod_base = OTHER; note = 2'-O-methyl ribonucleotide
  modified_base 34: mod_base = OTHER; note = 2'-O-methyl ribonucleotide
  modified_base 35: mod_base = OTHER; note = 2'-O-methyl ribonucleotide
  modified_base 36: mod_base = OTHER; note = 2'-O-methyl ribonucleotide
  modified_base 37: mod_base = OTHER; note = 2'-O-methyl ribonucleotide
  modified_base 38: mod_base = OTHER; note = 2'-O-methyl ribonucleotide
  modified_base 39: mod_base = OTHER; note = 2'-O-methyl ribonucleotide
  modified_base 40: mod_base = OTHER; note = 2'-O-methyl ribonucleotide
  modified_base 41: mod_base = OTHER; note = 2'-O-methyl ribonucleotide
  modified_base 42: mod_base = OTHER; note = 2'-O-methyl ribonucleotide
  modified_base 46: mod_base = OTHER; note = 2'-O-methyl ribonucleotide
  modified_base 48: mod_base = OTHER; note = 2'-O-methyl ribonucleotide
  modified_base 50: mod_base = OTHER; note = 2'-O-methyl ribonucleotide
  modified_base 52: mod_base = OTHER; note = 2'-O-methyl ribonucleotide
  modified_base 53: mod_base = OTHER; note = 2'-O-methyl ribonucleotide
  modified_base 54: mod_base = OTHER; note = 2'-O-methyl ribonucleotide
  modified_base 57: mod_base = OTHER; note = 2'-O-methyl ribonucleotide
  modified_base 61: mod_base = OTHER; note = 2'-O-methyl ribonucleotide
  modified_base 66: mod_base = OTHER; note = 2'-O-methyl ribonucleotide
  modified_base 67: mod_base = OTHER; note = 2'-O-methyl ribonucleotide
  modified_base 70: mod_base = OTHER; note = 2'-O-methyl ribonucleotide
  modified_base 71: mod_base = OTHER; note = 2'-O-methyl ribonucleotide
  modified_base 72: mod_base = OTHER; note = 2'-O-methyl ribonucleotide
  modified_base 73: mod_base = OTHER; note = 2'-O-methyl ribonucleotide
  modified_base 74: mod_base = OTHER; note = 2'-O-methyl ribonucleotide
  modified_base 75: mod_base = OTHER; note = 2'-O-methyl ribonucleotide
  modified_base 76: mod_base = OTHER; note = 2'-O-methyl ribonucleotide
  modified_base 77: mod_base = OTHER; note = 2'-O-methyl ribonucleotide
  modified_base 78: mod_base = OTHER; note = 2'-O-methyl ribonucleotide
  modified_base 79: mod_base = OTHER; note = 2'-O-methyl ribonucleotide
  modified_base 80: mod_base = OTHER; note = 2'-O-methyl ribonucleotide
  modified_base 82: mod_base = OTHER; note = 2'-O-methyl ribonucleotide
  modified_base 83: mod_base = OTHER; note = 2'-O-methyl ribonucleotide
  modified_base 84: mod_base = OTHER; note = 2'-O-methyl ribonucleotide
  modified_base 85: mod_base = OTHER; note = 2'-O-methyl ribonucleotide
  modified_base 86: mod_base = OTHER; note = 2'-O-methyl ribonucleotide
  modified_base 87: mod_base = OTHER; note = 2'-O-methyl ribonucleotide
  modified_base 89: mod_base = OTHER; note = 2'-O-methyl ribonucleotide
  modified_base 92: mod_base = OTHER; note = 2'-O-methyl ribonucleotide
  modified_base 93: mod_base = OTHER; note = 2'-O-methyl ribonucleotide
  modified_base 94: mod_base = OTHER; note = 2'-O-methyl ribonucleotide
  modified_base 95: mod_base = OTHER; note = 2'-O-methyl ribonucleotide
  modified_base 96: mod_base = OTHER; note = 2'-O-methyl ribonucleotide
  modified_base 97: mod_base = OTHER; note = 2'-O-methyl ribonucleotide
  modified_base 98: mod_base = OTHER; note = 2'-O-methyl ribonucleotide
  modified_base 99: mod_base = OTHER; note = 2'-O-methyl ribonucleotide
  modified_base 100: mod_base = OTHER; note = 2'-O-methyl ribonucleotide
  modified_base 101: mod_base = OTHER; note = uniform ribonucleotides (A, C, G, inosine or U), deoxynucleotides (A, G, C, inosine or T), ribonebularine, 2'-O-methylnebularine or deoxynebularine
  modified_base 102: mod_base = OTHER; note = uniform ribonucleotides (A, C, G, inosine or U), deoxynucleotides (A, G, C, inosine or T), ribonebularine, 2'-O-methylnebularine or deoxynebularine
  modified_base 103: mod_base = OTHER; note = uniform ribonucleotides (A, C, G, inosine or U), deoxynucleotides (A, G, C, inosine or T), ribonebularine, 2'-O-methylnebularine or deoxynebularine
  modified_base 1..4: mod_base = OTHER; note = phosphorothioate linkage
  modified_base 25..26: mod_base = OTHER; note = phosphorothioate linkage
  modified_base 64..65: mod_base = OTHER; note = phosphorothioate linkage
  modified_base 98..100: mod_base = OTHER; note = phosphorothioate linkage
  misc_feature 1..100: note = RNA
  misc_feature 101..103: note = Optionally DNA or RNA

SEQ ID NO: 3047 - DNA, 103 bp, synthetic construct; identical to SEQ ID NO: 1797
  source 1..103: mol_type = other DNA
  modified_base 1: mod_base = OTHER; note = 2'-O-methyl ribonucleotide
  modified_base 2: mod_base = OTHER; note = 2'-O-methyl ribonucleotide
  modified_base 3: mod_base = OTHER; note = 2'-O-methyl ribonucleotide
  modified_base 21: mod_base = OTHER; note = 2'-O-methyl ribonucleotide
  modified_base 28: mod_base = OTHER; note = 2'-O-methyl ribonucleotide
  modified_base 29: mod_base = OTHER; note = 2'-O-methyl ribonucleotide
  modified_base 30: mod_base = OTHER; note = 2'-O-methyl ribonucleotide
  modified_base 31: mod_base = OTHER; note = 2'-O-methyl ribonucleotide
  modified_base 32: mod_base = OTHER; note = 2'-O-methyl ribonucleotide
  modified_base 33: mod_base = OTHER; note = 2'-O-methyl ribonucleotide
  modified_base 34: mod_base = OTHER; note = 2'-O-methyl ribonucleotide
  modified_base 35: mod_base = OTHER; note = 2'-O-methyl ribonucleotide
  modified_base 36: mod_base = OTHER; note = 2'-O-methyl ribonucleotide
  modified_base 37: mod_base = OTHER; note = 2'-O-methyl ribonucleotide
  modified_base 38: mod_base = OTHER; note = 2'-O-methyl ribonucleotide
  modified_base 39: mod_base = OTHER; note = 2'-O-methyl ribonucleotide
  modified_base 40: mod_base = OTHER; note = 2'-O-methyl ribonucleotide
  modified_base 41: mod_base = OTHER; note = 2'-O-methyl ribonucleotide
  modified_base 42: mod_base = OTHER; note = 2'-O-methyl ribonucleotide
  modified_base 46: mod_base = OTHER; note = 2'-O-methyl ribonucleotide
  modified_base 48: mod_base = OTHER; note = 2'-O-methyl ribonucleotide
  modified_base 50: mod_base = OTHER; note = 2'-O-methyl ribonucleotide
  modified_base 52: mod_base = OTHER; note = 2'-O-methyl ribonucleotide
  modified_base 53: mod_base = OTHER; note = 2'-O-methyl ribonucleotide
  modified_base 54: mod_base = OTHER; note = 2'-O-methyl ribonucleotide
  modified_base 57: mod_base = OTHER; note = 2'-O-methyl ribonucleotide
  modified_base 61: mod_base = OTHER; note = 2'-O-methyl ribonucleotide
  modified_base 66: mod_base = OTHER; note = 2'-O-methyl ribonucleotide
  modified_base 67: mod_base = OTHER; note = 2'-O-methyl ribonucleotide
  modified_base 70: mod_base = OTHER; note = 2'-O-methyl ribonucleotide
  modified_base 71: mod_base = OTHER; note = 2'-O-methyl ribonucleotide
  modified_base 72: mod_base = OTHER; note = 2'-O-methyl ribonucleotide
  modified_base 73: mod_base = OTHER; note = 2'-O-methyl ribonucleotide
  modified_base 74: mod_base = OTHER; note = 2'-O-methyl ribonucleotide
  modified_base 75: mod_base = OTHER; note = 2'-O-methyl ribonucleotide
  modified_base 76: mod_base = OTHER; note = 2'-O-methyl ribonucleotide
  modified_base 77: mod_base = OTHER; note = 2'-O-methyl ribonucleotide
  modified_base 78: mod_base = OTHER; note = 2'-O-methyl ribonucleotide
  modified_base 79: mod_base = OTHER; note = 2'-O-methyl ribonucleotide
  modified_base 80: mod_base = OTHER; note = 2'-O-methyl ribonucleotide
  modified_base 82: mod_base = OTHER; note = 2'-O-methyl ribonucleotide
  modified_base 83: mod_base = OTHER; note = 2'-O-methyl ribonucleotide
  modified_base 84: mod_base = OTHER; note = 2'-O-methyl ribonucleotide
  modified_base 85: mod_base = OTHER; note = 2'-O-methyl ribonucleotide
  modified_base 86: mod_base = OTHER; note = 2'-O-methyl ribonucleotide
  modified_base 87: mod_base = OTHER; note = 2'-O-methyl ribonucleotide
  modified_base 89: mod_base = OTHER; note = 2'-O-methyl ribonucleotide
  modified_base 91: mod_base = OTHER; note = 2'-O-methyl ribonucleotide
  modified_base 92: mod_base = OTHER; note = 2'-O-methyl ribonucleotide
  modified_base 93: mod_base = OTHER; note = 2'-O-methyl ribonucleotide
  modified_base 94: mod_base = OTHER; note = 2'-O-methyl ribonucleotide
  modified_base 95: mod_base = OTHER; note = 2'-O-methyl ribonucleotide
  modified_base 96: mod_base = OTHER; note = 2'-O-methyl ribonucleotide
  modified_base 97: mod_base = OTHER; note = 2'-O-methyl ribonucleotide
  modified_base 98: mod_base = OTHER; note = 2'-O-methyl ribonucleotide
  modified_base 99: mod_base = OTHER; note = 2'-O-methyl ribonucleotide
  modified_base 100: mod_base = OTHER; note = 2'-O-methyl ribonucleotide
  modified_base 101: mod_base = OTHER; note = uniform ribonucleotides (A, C, G, inosine or U), deoxynucleotides (A, G, C, inosine or T), ribonebularine, 2'-O-methylnebularine or deoxynebularine
  modified_base 102: mod_base = OTHER; note = uniform ribonucleotides (A, C, G, inosine or U), deoxynucleotides (A, G, C, inosine or T), ribonebularine, 2'-O-methylnebularine or deoxynebularine
  modified_base 103: mod_base = OTHER; note = uniform ribonucleotides (A, C, G, inosine or U), deoxynucleotides (A, G, C, inosine or T), ribonebularine, 2'-O-methylnebularine or deoxynebularine
  modified_base 1..4: mod_base = OTHER; note = phosphorothioate linkage
  modified_base 25..26: mod_base = OTHER; note = phosphorothioate linkage
  modified_base 64..65: mod_base = OTHER; note = phosphorothioate linkage
  modified_base 98..100: mod_base = OTHER; note = phosphorothioate linkage
  misc_feature 1..100: note = RNA
  misc_feature 101..103: note = Optionally DNA or RNA

SEQ ID NO: 3048 - DNA, 103 bp, synthetic construct; identical to SEQ ID NO: 1797
  source 1..103: mol_type = other DNA
  modified_base 1: mod_base = OTHER; note = 2'-O-methyl ribonucleotide
  modified_base 2: mod_base = OTHER; note = 2'-O-methyl ribonucleotide
  modified_base 3: mod_base = OTHER; note = 2'-O-methyl ribonucleotide
  modified_base 21: mod_base = OTHER; note = 2'-O-methyl ribonucleotide
  modified_base 28: mod_base = OTHER; note = 2'-O-methyl ribonucleotide
  modified_base 29: mod_base = OTHER; note = 2'-O-methyl ribonucleotide
  modified_base 30: mod_base = OTHER; note = 2'-O-methyl ribonucleotide
  modified_base 31: mod_base = OTHER; note = 2'-O-methyl ribonucleotide
  modified_base 32: mod_base = OTHER; note = 2'-O-methyl ribonucleotide
  modified_base 34: mod_base = OTHER; note = 2'-O-methyl ribonucleotide
  modified_base 35: mod_base = OTHER; note = 2'-O-methyl ribonucleotide
  modified_base 36: mod_base = OTHER; note = 2'-O-methyl ribonucleotide
  modified_base 37: mod_base = OTHER; note = 2'-O-methyl ribonucleotide
  modified_base 38: mod_base = OTHER; note = 2'-O-methyl ribonucleotide
  modified_base 39: mod_base = OTHER; note = 2'-O-methyl ribonucleotide
  modified_base 40: mod_base = OTHER; note = 2'-O-methyl ribonucleotide
  modified_base 41: mod_base = OTHER; note = 2'-O-methyl ribonucleotide
  modified_base 42: mod_base = OTHER; note = 2'-O-methyl ribonucleotide
  modified_base 46: mod_base = OTHER; note = 2'-O-methyl ribonucleotide
  modified_base 48: mod_base = OTHER; note = 2'-O-methyl ribonucleotide
  modified_base 50: mod_base = OTHER; note = 2'-O-methyl ribonucleotide
  modified_base 52: mod_base = OTHER; note = 2'-O-methyl ribonucleotide
  modified_base 53: mod_base = OTHER; note = 2'-O-methyl ribonucleotide
  modified_base 54: mod_base = OTHER; note = 2'-O-methyl ribonucleotide
  modified_base 57: mod_base = OTHER; note = 2'-O-methyl ribonucleotide
  modified_base 61: mod_base = OTHER; note = 2'-O-methyl ribonucleotide
  modified_base 66: mod_base = OTHER; note = 2'-O-methyl ribonucleotide
  modified_base 67: mod_base = OTHER; note = 2'-O-methyl ribonucleotide
  modified_base 70: mod_base = OTHER; note = 2'-O-methyl ribonucleotide
  modified_base 71: mod_base = OTHER; note = 2'-O-methyl ribonucleotide
  modified_base 72: mod_base = OTHER; note = 2'-O-methyl ribonucleotide
  modified_base 73: mod_base = OTHER; note = 2'-O-methyl ribonucleotide
  modified_base 74: mod_base = OTHER; note = 2'-O-methyl ribonucleotide
  modified_base 75: mod_base = OTHER; note = 2'-O-methyl ribonucleotide
  modified_base 76: mod_base = OTHER; note = 2'-O-methyl ribonucleotide
  modified_base 77: mod_base = OTHER; note = 2'-O-methyl ribonucleotide
  modified_base 78: mod_base = OTHER; note = 2'-O-methyl ribonucleotide
  modified_base 79: mod_base = OTHER; note = 2'-O-methyl ribonucleotide
  modified_base 80: mod_base = OTHER; note = 2'-O-methyl ribonucleotide
  modified_base 82: mod_base = OTHER; note = 2'-O-methyl ribonucleotide
  modified_base 83: mod_base = OTHER; note = 2'-O-methyl ribonucleotide
  modified_base 84: mod_base = OTHER; note = 2'-O-methyl ribonucleotide
  modified_base 85: mod_base = OTHER; note = 2'-O-methyl ribonucleotide
  modified_base 86: mod_base = OTHER; note = 2'-O-methyl ribonucleotide
  modified_base 87: mod_base = OTHER; note = 2'-O-methyl ribonucleotide
  modified_base 89: mod_base = OTHER; note = 2'-O-methyl ribonucleotide
  modified_base 92: mod_base = OTHER; note = 2'-O-methyl ribonucleotide
  modified_base 93: mod_base = OTHER; note = 2'-O-methyl ribonucleotide
  modified_base 94: mod_base = OTHER; note = 2'-O-methyl ribonucleotide
  modified_base 95: mod_base = OTHER; note = 2'-O-methyl ribonucleotide
  modified_base 96: mod_base = OTHER; note = 2'-O-methyl ribonucleotide
  modified_base 97: mod_base = OTHER; note = 2'-O-methyl ribonucleotide
  modified_base 98: mod_base = OTHER; note = 2'-O-methyl ribonucleotide
  modified_base 99: mod_base = OTHER; note = 2'-O-methyl ribonucleotide
  modified_base 100: mod_base = OTHER; note = 2'-O-methyl ribonucleotide
  modified_base 101: mod_base = OTHER; note = uniform ribonucleotides (A, C, G, inosine or U), deoxynucleotides (A, G, C, inosine or T), ribonebularine, 2'-O-methylnebularine or deoxynebularine
  modified_base 102: mod_base = OTHER; note = uniform ribonucleotides (A, C, G, inosine or U), deoxynucleotides (A, G, C, inosine or T), ribonebularine, 2'-O-methylnebularine or deoxynebularine
  modified_base 103: mod_base = OTHER; note = uniform ribonucleotides (A, C, G, inosine or U), deoxynucleotides (A, G, C, inosine or T), ribonebularine, 2'-O-methylnebularine or deoxynebularine
  modified_base 1..4: mod_base = OTHER; note = phosphorothioate linkage
  modified_base 25..26: mod_base = OTHER; note = phosphorothioate linkage
  modified_base 64..65: mod_base = OTHER; note = phosphorothioate linkage
  modified_base 98..100: mod_base = OTHER; note = phosphorothioate linkage
  misc_feature 1..100: note = RNA
  misc_feature 101..103: note = Optionally DNA or RNA

SEQ ID NO: 3049 - DNA, 103 bp, synthetic construct; identical to SEQ ID NO: 1797
  source 1..103: mol_type = other DNA
  modified_base 1: mod_base = OTHER; note = 2'-O-methyl ribonucleotide
  modified_base 2: mod_base = OTHER; note = 2'-O-methyl ribonucleotide
  modified_base 3: mod_base = OTHER; note = 2'-O-methyl ribonucleotide
  modified_base 21: mod_base = OTHER; note = 2'-O-methyl ribonucleotide
  modified_base 28: mod_base = OTHER; note = 2'-O-methyl ribonucleotide
  modified_base 29: mod_base = OTHER; note = 2'-O-methyl ribonucleotide
  modified_base 30: mod_base = OTHER; note = 2'-O-methyl ribonucleotide
  modified_base 31: mod_base = OTHER; note = 2'-O-methyl ribonucleotide
  modified_base 32: mod_base = OTHER; note = 2'-O-methyl ribonucleotide
  modified_base 34: mod_base = OTHER; note = 2'-O-methyl ribonucleotide
  modified_base 35: mod_base = OTHER; note = 2'-O-methyl ribonucleotide
  modified_base 36: mod_base = OTHER; note = 2'-O-methyl ribonucleotide
  modified_base 37: mod_base = OTHER; note = 2'-O-methyl ribonucleotide
  modified_base 38: mod_base = OTHER; note = 2'-O-methyl ribonucleotide
  modified_base 39: mod_base = OTHER; note = 2'-O-methyl ribonucleotide
  modified_base 40: mod_base = OTHER; note = 2'-O-methyl ribonucleotide
  modified_base 41: mod_base = OTHER; note = 2'-O-methyl ribonucleotide
  modified_base 42: mod_base = OTHER; note = 2'-O-methyl ribonucleotide
  modified_base 46: mod_base = OTHER; note = 2'-O-methyl ribonucleotide
  modified_base 48: mod_base = OTHER; note = 2'-O-methyl ribonucleotide
  modified_base 50: mod_base = OTHER; note = 2'-O-methyl ribonucleotide
  modified_base 52: mod_base = OTHER; note = 2'-O-methyl ribonucleotide
  modified_base 53: mod_base = OTHER; note = 2'-O-methyl ribonucleotide
  modified_base 54: mod_base = OTHER; note = 2'-O-methyl ribonucleotide
  modified_base 57: mod_base = OTHER; note = 2'-O-methyl ribonucleotide
  modified_base 61: mod_base = OTHER; note = 2'-O-methyl ribonucleotide
  modified_base 66: mod_base = OTHER; note = 2'-O-methyl ribonucleotide
  modified_base 67: mod_base = OTHER; note = 2'-O-methyl ribonucleotide
  modified_base 70: mod_base = OTHER; note = 2'-O-methyl ribonucleotide
  modified_base 71: mod_base = OTHER; note = 2'-O-methyl ribonucleotide
  modified_base 72: mod_base = OTHER; note = 2'-O-methyl ribonucleotide
  modified_base 73: mod_base = OTHER; note = 2'-O-methyl ribonucleotide
  modified_base 74: mod_base = OTHER; note = 2'-O-methyl ribonucleotide
  modified_base 75: mod_base = OTHER; note = 2'-O-methyl ribonucleotide
  modified_base 76: mod_base = OTHER; note = 2'-O-methyl ribonucleotide
  modified_base 77: mod_base = OTHER; note = 2'-O-methyl ribonucleotide
  modified_base 78: mod_base = OTHER; note = 2'-O-methyl ribonucleotide
  modified_base 79: mod_base = OTHER; note = 2'-O-methyl ribonucleotide
  modified_base 80: mod_base = OTHER; note = 2'-O-methyl ribonucleotide
  modified_base 82: mod_base = OTHER; note = 2'-O-methyl ribonucleotide
  modified_base 83: mod_base = OTHER; note = 2'-O-methyl ribonucleotide
  modified_base 84: mod_base = OTHER; note = 2'-O-methyl ribonucleotide
  modified_base 85: mod_base = OTHER; note = 2'-O-methyl ribonucleotide
  modified_base 86: mod_base = OTHER; note = 2'-O-methyl ribonucleotide
  modified_base 87: mod_base = OTHER; note = 2'-O-methyl ribonucleotide
  modified_base 89: mod_base = OTHER; note = 2'-O-methyl ribonucleotide
  modified_base 91: mod_base = OTHER; note = 2'-O-methyl ribonucleotide
  modified_base 92: mod_base = OTHER; note = 2'-O-methyl ribonucleotide
  modified_base 93: mod_base = OTHER; note = 2'-O-methyl ribonucleotide
  modified_base 94: mod_base = OTHER; note = 2'-O-methyl ribonucleotide
  modified_base 95: mod_base = OTHER; note = 2'-O-methyl ribonucleotide
  modified_base 96: mod_base = OTHER; note = 2'-O-methyl ribonucleotide
  modified_base 97: mod_base = OTHER; note = 2'-O-methyl ribonucleotide
  modified_base 98: mod_base = OTHER; note = 2'-O-methyl ribonucleotide
  modified_base 99: mod_base = OTHER; note = 2'-O-methyl ribonucleotide
  modified_base 100: mod_base = OTHER; note = 2'-O-methyl ribonucleotide
  modified_base 101: mod_base = OTHER; note = uniform ribonucleotides (A, C, G, inosine or U), deoxynucleotides (A, G, C, inosine or T), ribonebularine, 2'-O-methylnebularine or deoxynebularine
  modified_base 102: mod_base = OTHER; note = uniform ribonucleotides (A, C, G, inosine or U), deoxynucleotides (A, G, C, inosine or T), ribonebularine, 2'-O-methylnebularine or deoxynebularine
  modified_base 103: mod_base = OTHER; note = uniform ribonucleotides (A, C, G, inosine or U), deoxynucleotides (A, G, C, inosine or T), ribonebularine, 2'-O-methylnebularine or deoxynebularine
  modified_base 1..4: mod_base = OTHER; note = phosphorothioate linkage
  modified_base 25..26: mod_base = OTHER; note = phosphorothioate linkage
  modified_base 64..65: mod_base = OTHER; note = phosphorothioate linkage
  modified_base 98..100: mod_base = OTHER; note = phosphorothioate linkage
  misc_feature 1..100: note = RNA
  misc_feature 101..103: note = Optionally DNA or RNA

SEQ ID NO: 3050 - DNA, 103 bp, synthetic construct; identical to SEQ ID NO: 1797
  source 1..103: mol_type = other DNA
  modified_base 1: mod_base = OTHER; note = 2'-O-methyl ribonucleotide
  modified_base 2: mod_base = OTHER; note = 2'-O-methyl ribonucleotide
  modified_base 3: mod_base = OTHER; note = 2'-O-methyl ribonucleotide
  modified_base 21: mod_base = OTHER; note = 2'-O-methyl ribonucleotide
  modified_base 28: mod_base = OTHER; note = 2'-O-methyl ribonucleotide
  modified_base 29: mod_base = OTHER; note = 2'-O-methyl ribonucleotide
  modified_base 30: mod_base = OTHER; note = 2'-O-methyl ribonucleotide
  modified_base 31: mod_base = OTHER; note = 2'-O-methyl ribonucleotide
  modified_base 32: mod_base = OTHER; note = 2'-O-methyl ribonucleotide
  modified_base 34: mod_base = OTHER; note = 2'-O-methyl ribonucleotide
  modified_base 35: mod_base = OTHER; note = 2'-O-methyl ribonucleotide
  modified_base 36: mod_base = OTHER; note = 2'-O-methyl ribonucleotide
  modified_base 37: mod_base = OTHER; note = 2'-O-methyl ribonucleotide
  modified_base 38: mod_base = OTHER; note = 2'-O-methyl ribonucleotide
  modified_base 39: mod_base = OTHER; note = 2'-O-methyl ribonucleotide
  modified_base 40: mod_base = OTHER; note = 2'-O-methyl ribonucleotide
  modified_base 41: mod_base = OTHER; note = 2'-O-methyl ribonucleotide
  modified_base 42: mod_base = OTHER; note = 2'-O-methyl ribonucleotide
  modified_base 46: mod_base = OTHER; note = 2'-O-methyl ribonucleotide
  modified_base 48: mod_base = OTHER; note = 2'-O-methyl ribonucleotide
  modified_base 50: mod_base = OTHER; note = 2'-O-methyl ribonucleotide
  modified_base 52: mod_base = OTHER; note = 2'-O-methyl ribonucleotide
  modified_base 53: mod_base = OTHER; note = 2'-O-methyl ribonucleotide
  modified_base 54: mod_base = OTHER; note = 2'-O-methyl ribonucleotide
  modified_base 55: mod_base = OTHER; note = 2'-O-methyl ribonucleotide
  modified_base 56: mod_base = OTHER; note = 2'-O-methyl ribonucleotide
  modified_base 57: mod_base = OTHER; note = 2'-O-methyl ribonucleotide
  modified_base 60: mod_base = OTHER; note = 2'-O-methyl ribonucleotide
  modified_base 61: mod_base = OTHER; note = 2'-O-methyl ribonucleotide
  modified_base 66: mod_base = OTHER; note = 2'-O-methyl ribonucleotide
  modified_base 67: mod_base = OTHER; note = 2'-O-methyl ribonucleotide
  modified_base 70: mod_base = OTHER; note = 2'-O-methyl ribonucleotide
  modified_base 71: mod_base = OTHER; note = 2'-O-methyl ribonucleotide
  modified_base 72: mod_base = OTHER; note = 2'-O-methyl ribonucleotide
  modified_base 74: mod_base = OTHER; note = 2'-O-methyl ribonucleotide
  modified_base 75: mod_base = OTHER; note = 2'-O-methyl ribonucleotide
  modified_base 76: mod_base = OTHER; note = 2'-O-methyl ribonucleotide
  modified_base 77: mod_base = OTHER; note = 2'-O-methyl ribonucleotide
  modified_base 78: mod_base = OTHER; note = 2'-O-methyl ribonucleotide
  modified_base 79: mod_base = OTHER; note = 2'-O-methyl ribonucleotide
  modified_base 80: mod_base = OTHER; note = 2'-O-methyl ribonucleotide
  modified_base 82: mod_base = OTHER; note = 2'-O-methyl ribonucleotide
  modified_base 83: mod_base = OTHER; note = 2'-O-methyl ribonucleotide
  modified_base 84: mod_base = OTHER; note = 2'-O-methyl ribonucleotide
  modified_base 85: mod_base = OTHER; note = 2'-O-methyl ribonucleotide
  modified_base 86: mod_base = OTHER; note = 2'-O-methyl ribonucleotide
  modified_base 87: mod_base = OTHER; note = 2'-O-methyl ribonucleotide
  modified_base 89: mod_base = OTHER; note = 2'-O-methyl ribonucleotide
  modified_base 92: mod_base = OTHER; note = 2'-O-methyl ribonucleotide
  modified_base 93: mod_base = OTHER; note = 2'-O-methyl ribonucleotide
  modified_base 94: mod_base = OTHER; note = 2'-O-methyl ribonucleotide
  modified_base 95: mod_base = OTHER; note = 2'-O-methyl ribonucleotide
  modified_base 96: mod_base = OTHER; note = 2'-O-methyl ribonucleotide
  modified_base 97: mod_base = OTHER; note = 2'-O-methyl ribonucleotide
  modified_base 98: mod_base = OTHER; note = 2'-O-methyl ribonucleotide
  modified_base 99: mod_base = OTHER; note = 2'-O-methyl ribonucleotide
  modified_base 100: mod_base = OTHER; note = 2'-O-methyl ribonucleotide
  modified_base 101: mod_base = OTHER; note = uniform ribonucleotides (A, C, G, inosine or U), deoxynucleotides (A, G, C, inosine or T), ribonebularine, 2'-O-methylnebularine or deoxynebularine
  modified_base 102: mod_base = OTHER; note = uniform ribonucleotides (A, C, G, inosine or U), deoxynucleotides (A, G, C, inosine or T), ribonebularine, 2'-O-methylnebularine or deoxynebularine
  modified_base 103: mod_base = OTHER; note = uniform ribonucleotides (A, C, G, inosine or U), deoxynucleotides (A, G, C, inosine or T), ribonebularine, 2'-O-methylnebularine or deoxynebularine
  modified_base 1..4: mod_base = OTHER; note = phosphorothioate linkage
  modified_base 25..26: mod_base = OTHER; note = phosphorothioate linkage
  modified_base 64..65: mod_base = OTHER; note = phosphorothioate linkage
  modified_base 98..100: mod_base = OTHER; note = phosphorothioate linkage
  misc_feature 1..100: note = RNA
  misc_feature 101..103: note = Optionally DNA or RNA

SEQ ID NO: 3051 - DNA, 103 bp, synthetic construct; identical to SEQ ID NO: 1795
  source 1..103: mol_type = other DNA
  modified_base 1: mod_base = OTHER; note = 2'-O-methyl ribonucleotide
  modified_base 2: mod_base = OTHER; note = 2'-O-methyl ribonucleotide
  modified_base 3: mod_base = OTHER; note = 2'-O-methyl ribonucleotide
  modified_base 21: mod_base = OTHER; note = 2'-O-methyl ribonucleotide
  modified_base 28: mod_base = OTHER; note = 2'-O-methyl ribonucleotide
  modified_base 29: mod_base = OTHER; note = 2'-O-methyl ribonucleotide
  modified_base 30: mod_base = OTHER; note = 2'-O-methyl ribonucleotide
  modified_base 31: mod_base = OTHER; note = 2'-O-methyl ribonucleotide
  modified_base 32: mod_base = OTHER; note = 2'-O-methyl ribonucleotide
  modified_base 33: mod_base = OTHER; note = 2'-O-methyl ribonucleotide
  modified_base 34: mod_base = OTHER; note = 2'-O-methyl ribonucleotide
  modified_base 35: mod_base = OTHER; note = 2'-O-methyl ribonucleotide
  modified_base 36: mod_base = OTHER; note = 2'-O-methyl ribonucleotide
  modified_base 37: mod_base = OTHER; note = 2'-O-methyl ribonucleotide
  modified_base 38: mod_base = OTHER; note = 2'-O-methyl ribonucleotide
  modified_base 39: mod_base = OTHER; note = 2'-O-methyl ribonucleotide
  modified_base 40: mod_base = OTHER; note = 2'-O-methyl ribonucleotide
  modified_base 41: mod_base = OTHER; note = 2'-O-methyl ribonucleotide
  modified_base 42: mod_base = OTHER; note = 2'-O-methyl ribonucleotide
  modified_base 46: mod_base = OTHER; note = 2'-O-methyl ribonucleotide
  modified_base 48: mod_base = OTHER; note = 2'-O-methyl ribonucleotide
  modified_base 50: mod_base = OTHER; note = 2'-O-methyl ribonucleotide
  modified_base 52: mod_base = OTHER; note = 2'-O-methyl ribonucleotide
  modified_base 53: mod_base = OTHER; note = 2'-O-methyl ribonucleotide
  modified_base 54: mod_base = OTHER; note = 2'-O-methyl ribonucleotide
  modified_base 55: mod_base = OTHER; note = 2'-O-methyl ribonucleotide
  modified_base 56: mod_base = OTHER; note = 2'-O-methyl ribonucleotide
  modified_base 57: mod_base = OTHER; note = 2'-O-methyl ribonucleotide
  modified_base 60: mod_base = OTHER; note = 2'-O-methyl ribonucleotide
  modified_base 61: mod_base = OTHER; note = 2'-O-methyl ribonucleotide
  modified_base 66: mod_base = OTHER; note = 2'-O-methyl ribonucleotide
  modified_base 67: mod_base = OTHER; note = 2'-O-methyl ribonucleotide
  modified_base 70: mod_base = OTHER; note = 2'-O-methyl ribonucleotide
  modified_base 71: mod_base = OTHER; note = 2'-O-methyl ribonucleotide
  modified_base 72: mod_base = OTHER; note = 2'-O-methyl ribonucleotide
  modified_base 73: mod_base = OTHER; note = 2'-O-methyl ribonucleotide
  modified_base 74: mod_base = OTHER; note = 2'-O-methyl ribonucleotide
  modified_base 75: mod_base = OTHER; note = 2'-O-methyl ribonucleotide
  modified_base 76: mod_base = OTHER; note = 2'-O-methyl ribonucleotide
  modified_base 77: mod_base = OTHER; note = 2'-O-methyl ribonucleotide
  modified_base 78: mod_base = OTHER; note = 2'-O-methyl ribonucleotide
  modified_base 79: mod_base = OTHER; note = 2'-O-methyl ribonucleotide
  modified_base 80: mod_base = OTHER; note = 2'-O-methyl ribonucleotide
  modified_base 81: mod_base = OTHER; note = 2'-O-methyl ribonucleotide
  modified_base 83: mod_base = OTHER; note = 2'-O-methyl ribonucleotide
  modified_base 84: mod_base = OTHER; note = 2'-O-methyl ribonucleotide
  modified_base 85: mod_base = OTHER; note = 2'-O-methyl ribonucleotide
  modified_base 86: mod_base = OTHER; note = 2'-O-methyl ribonucleotide
  modified_base 87: mod_base = OTHER; note = 2'-O-methyl ribonucleotide
  modified_base 88: mod_base = OTHER; note = 2'-O-methyl ribonucleotide
  modified_base 89: mod_base = OTHER; note = 2'-O-methyl ribonucleotide
  modified_base 90: mod_base = OTHER; note = 2'-O-methyl ribonucleotide
  modified_base 91: mod_base = OTHER; note = 2'-O-methyl ribonucleotide
  modified_base 92: mod_base = OTHER; note = 2'-O-methyl ribonucleotide
  modified_base 93: mod_base = OTHER; note = 2'-O-methyl ribonucleotide
  modified_base 94: mod_base = OTHER; note = 2'-O-methyl ribonucleotide
  modified_base 95: mod_base = OTHER; note = 2'-O-methyl ribonucleotide
  modified_base 96: mod_base = OTHER; note = 2'-O-methyl ribonucleotide
  modified_base 97: mod_base = OTHER; note = 2'-O-methyl ribonucleotide
  modified_base 98: mod_base = OTHER; note = 2'-O-methyl ribonucleotide
  modified_base 99: mod_base = OTHER; note = 2'-O-methyl ribonucleotide
  modified_base 100: mod_base = OTHER; note = 2'-O-methyl ribonucleotide
  modified_base 101: mod_base = OTHER; note = uniform ribonucleotides (A, C, G, inosine or U), deoxynucleotides (A, G, C, inosine or T), ribonebularine, 2'-O-methylnebularine or deoxynebularine
  modified_base 102: mod_base = OTHER; note = uniform ribonucleotides (A, C, G, inosine or U), deoxynucleotides (A, G, C, inosine or T), ribonebularine, 2'-O-methylnebularine or deoxynebularine
  modified_base 103: mod_base = OTHER; note = uniform ribonucleotides (A, C, G, inosine or U), deoxynucleotides (A, G, C, inosine or T), ribonebularine, 2'-O-methylnebularine or deoxynebularine
  modified_base 1..4: mod_base = OTHER; note = phosphorothioate linkage
  modified_base 25..26: mod_base = OTHER; note = phosphorothioate linkage
  modified_base 45..46: mod_base = OTHER; note = phosphorothioate linkage
  modified_base 64..65: mod_base = OTHER; note = phosphorothioate linkage
  modified_base 98..100: mod_base = OTHER; note = phosphorothioate linkage
  misc_feature 1..100: note = RNA
  misc_feature 101..103: note = Optionally DNA or RNA

SEQ ID NO: 3052 - DNA, 103 bp, synthetic construct; identical to SEQ ID NO: 1795
  source 1..103: mol_type = other DNA
  modified_base 1: mod_base = OTHER; note = 2'-O-methyl ribonucleotide
  modified_base 2: mod_base = OTHER; note = 2'-O-methyl ribonucleotide
  modified_base 3: mod_base = OTHER; note = 2'-O-methyl ribonucleotide
  modified_base 21: mod_base = OTHER; note = 2'-O-methyl ribonucleotide
  modified_base 28: mod_base = OTHER; note = 2'-O-methyl ribonucleotide
  modified_base 29: mod_base = OTHER; note = 2'-O-methyl ribonucleotide
  modified_base 30: mod_base = OTHER; note = 2'-O-methyl ribonucleotide
  modified_base 31: mod_base = OTHER; note = 2'-O-methyl ribonucleotide
  modified_base 32: mod_base = OTHER; note = 2'-O-methyl ribonucleotide
  modified_base 34: mod_base = OTHER; note = 2'-O-methyl ribonucleotide
  modified_base 35: mod_base = OTHER; note = 2'-O-methyl ribonucleotide
  modified_base 36: mod_base = OTHER; note = 2'-O-methyl ribonucleotide
  modified_base 37: mod_base = OTHER; note = 2'-O-methyl ribonucleotide
  modified_base 38: mod_base = OTHER; note = 2'-O-methyl ribonucleotide
  modified_base 39: mod_base = OTHER; note = 2'-O-methyl ribonucleotide
  modified_base 40: mod_base = OTHER; note = 2'-O-methyl ribonucleotide
  modified_base 41: mod_base = OTHER; note = 2'-O-methyl ribonucleotide
  modified_base 42: mod_base = OTHER; note = 2'-O-methyl ribonucleotide
  modified_base 46: mod_base = OTHER; note = 2'-O-methyl ribonucleotide
  modified_base 48: mod_base = OTHER; note = 2'-O-methyl ribonucleotide
  modified_base 50: mod_base = OTHER; note = 2'-O-methyl ribonucleotide
  modified_base 52: mod_base = OTHER; note = 2'-O-methyl ribonucleotide
  modified_base 53: mod_base = OTHER; note = 2'-O-methyl ribonucleotide
  modified_base 54: mod_base = OTHER; note = 2'-O-methyl ribonucleotide
  modified_base 55: mod_base = OTHER; note = 2'-O-methyl ribonucleotide
  modified_base 56: mod_base = OTHER; note = 2'-O-methyl ribonucleotide
  modified_base 57: mod_base = OTHER; note = 2'-O-methyl ribonucleotide
  modified_base 60: mod_base = OTHER; note = 2'-O-methyl ribonucleotide
  modified_base 61: mod_base = OTHER; note = 2'-O-methyl ribonucleotide
  modified_base 66: mod_base = OTHER; note = 2'-O-methyl ribonucleotide
  modified_base 67: mod_base = OTHER; note = 2'-O-methyl ribonucleotide
  modified_base 70: mod_base = OTHER; note = 2'-O-methyl ribonucleotide
  modified_base 71: mod_base = OTHER; note = 2'-O-methyl ribonucleotide
  modified_base 72: mod_base = OTHER; note = 2'-O-methyl ribonucleotide
  modified_base 74: mod_base = OTHER; note = 2'-O-methyl ribonucleotide
  modified_base 75: mod_base = OTHER; note = 2'-O-methyl ribonucleotide
  modified_base 76: mod_base = OTHER; note = 2'-O-methyl ribonucleotide
  modified_base 77: mod_base = OTHER; note = 2'-O-methyl ribonucleotide
  modified_base 78: mod_base = OTHER; note = 2'-O-methyl ribonucleotide
  modified_base 79: mod_base = OTHER; note = 2'-O-methyl ribonucleotide
  modified_base 80: mod_base = OTHER; note = 2'-O-methyl ribonucleotide
  modified_base 81: mod_base = OTHER; note = 2'-O-methyl ribonucleotide
  modified_base 83: mod_base = OTHER; note = 2'-O-methyl ribonucleotide
  modified_base 84: mod_base = OTHER; note = 2'-O-methyl ribonucleotide
  modified_base 85: mod_base = OTHER; note = 2'-O-methyl ribonucleotide
  modified_base 86: mod_base = OTHER; note = 2'-O-methyl ribonucleotide
  modified_base 87: mod_base = OTHER; note = 2'-O-methyl ribonucleotide
  modified_base 88: mod_base = OTHER; note = 2'-O-methyl ribonucleotide
  modified_base 89: mod_base = OTHER; note = 2'-O-methyl ribonucleotide
  modified_base 90: mod_base = OTHER; note = 2'-O-methyl ribonucleotide
  modified_base 91: mod_base = OTHER; note = 2'-O-methyl ribonucleotide
  modified_base 92: mod_base = OTHER; note = 2'-O-methyl ribonucleotide
  modified_base 93: mod_base = OTHER; note = 2'-O-methyl ribonucleotide
  modified_base 94: mod_base = OTHER; note = 2'-O-methyl ribonucleotide
  modified_base 95: mod_base = OTHER; note = 2'-O-methyl ribonucleotide
  modified_base 96: mod_base = OTHER; note = 2'-O-methyl ribonucleotide
  modified_base 97: mod_base = OTHER; note = 2'-O-methyl ribonucleotide
  modified_base 98: mod_base = OTHER; note = 2'-O-methyl ribonucleotide
  modified_base 99: mod_base = OTHER; note = 2'-O-methyl ribonucleotide
  modified_base 100: mod_base = OTHER; note = 2'-O-methyl ribonucleotide
  modified_base 101: mod_base = OTHER; note = uniform ribonucleotides (A, C, G, inosine or U), deoxynucleotides (A, G, C, inosine or T), ribonebularine, 2'-O-methylnebularine or deoxynebularine
  modified_base 102: mod_base = OTHER; note = uniform ribonucleotides (A, C, G, inosine or U), deoxynucleotides (A, G, C, inosine or T), ribonebularine, 2'-O-methylnebularine or deoxynebularine
  modified_base 103: mod_base = OTHER; note = uniform ribonucleotides (A, C, G, inosine or U), deoxynucleotides (A, G, C, inosine or T), ribonebularine, 2'-O-methylnebularine or deoxynebularine
  modified_base 1..4: mod_base = OTHER; note = phosphorothioate linkage
  modified_base 25..26: mod_base = OTHER; note = phosphorothioate linkage
  modified_base 45..46: mod_base = OTHER; note = phosphorothioate linkage
  modified_base 64..65: mod_base = OTHER; note = phosphorothioate linkage
  modified_base 98..100: mod_base = OTHER; note = phosphorothioate linkage
  misc_feature 1..100: note = RNA
  misc_feature 101..103: note = Optionally DNA or RNA

SEQ ID NO: 3053 - DNA, 103 bp, synthetic construct; identical to SEQ ID NO: 1796
  source 1..103: mol_type = other DNA
  modified_base 1: mod_base = OTHER; note = 2'-O-methyl ribonucleotide
  modified_base 2: mod_base = OTHER; note = 2'-O-methyl ribonucleotide
  modified_base 3: mod_base = OTHER; note = 2'-O-methyl ribonucleotide
  modified_base 21: mod_base = OTHER; note = 2'-O-methyl ribonucleotide
  modified_base 28: mod_base = OTHER; note = 2'-O-methyl ribonucleotide
  modified_base 29: mod_base = OTHER; note = 2'-O-methyl ribonucleotide
  modified_base 30: mod_base = OTHER; note = 2'-O-methyl ribonucleotide
  modified_base 31: mod_base = OTHER; note = 2'-O-methyl ribonucleotide
  modified_base 32: mod_base = OTHER; note = 2'-O-methyl ribonucleotide
  modified_base 33: mod_base = OTHER; note = 2'-O-methyl ribonucleotide
  modified_base 34: mod_base = OTHER; note = 2'-O-methyl ribonucleotide
  modified_base 35: mod_base = OTHER; note = 2'-O-methyl ribonucleotide
  modified_base 36: mod_base = OTHER; note = 2'-O-methyl ribonucleotide
  modified_base 37: mod_base = OTHER; note = 2'-O-methyl ribonucleotide
  modified_base 38: mod_base = OTHER; note = 2'-O-methyl ribonucleotide
  modified_base 39: mod_base = OTHER; note = 2'-O-methyl ribonucleotide
  modified_base 40: mod_base = OTHER; note = 2'-O-methyl ribonucleotide
  modified_base 41: mod_base = OTHER; note = 2'-O-methyl ribonucleotide
  modified_base 42: mod_base = OTHER; note = 2'-O-methyl ribonucleotide
  modified_base 46: mod_base = OTHER; note = 2'-O-methyl ribonucleotide
  modified_base 48: mod_base = OTHER; note = 2'-O-methyl ribonucleotide
  modified_base 50: mod_base = OTHER; note = 2'-O-methyl ribonucleotide
  modified_base 52: mod_base = OTHER; note = 2'-O-methyl ribonucleotide
  modified_base 53: mod_base = OTHER; note = 2'-O-methyl ribonucleotide
  modified_base 54: mod_base = OTHER; note = 2'-O-methyl ribonucleotide
  modified_base 55: mod_base = OTHER; note = 2'-O-methyl ribonucleotide
  modified_base 56: mod_base = OTHER; note = 2'-O-methyl ribonucleotide
  modified_base 57: mod_base = OTHER; note = 2'-O-methyl ribonucleotide
  modified_base 60: mod_base = OTHER; note = 2'-O-methyl ribonucleotide
  modified_base 61: mod_base = OTHER; note = 2'-O-methyl ribonucleotide
  modified_base 66: mod_base = OTHER; note = 2'-O-methyl ribonucleotide
  modified_base 67: mod_base = OTHER; note = 2'-O-methyl ribonucleotide
  modified_base 70: mod_base = OTHER; note = 2'-O-methyl ribonucleotide
  modified_base 71: mod_base = OTHER; note = 2'-O-methyl ribonucleotide
  modified_base 72: mod_base = OTHER; note = 2'-O-methyl ribonucleotide
  modified_base 73: mod_base = OTHER; note = 2'-O-methyl ribonucleotide
  modified_base 74: mod_base = OTHER; note = 2'-O-methyl ribonucleotide
  modified_base 75: mod_base = OTHER; note = 2'-O-methyl ribonucleotide
  modified_base 76: mod_base = OTHER; note = 2'-O-methyl ribonucleotide
  modified_base 77: mod_base = OTHER; note = 2'-O-methyl ribonucleotide
  modified_base 78: mod_base = OTHER; note = 2'-O-methyl ribonucleotide
  modified_base 79: mod_base = OTHER; note = 2'-O-methyl ribonucleotide
  modified_base 80: mod_base = OTHER; note = 2'-O-methyl ribonucleotide
  modified_base 81: mod_base = OTHER; note = 2'-O-methyl ribonucleotide
  modified_base 83: mod_base = OTHER; note = 2'-O-methyl ribonucleotide
  modified_base 84: mod_base = OTHER; note = 2'-O-methyl ribonucleotide
  modified_base 85: mod_base = OTHER; note = 2'-O-methyl ribonucleotide
  modified_base 86: mod_base = OTHER; note = 2'-O-methyl ribonucleotide
  modified_base 87: mod_base = OTHER; note = 2'-O-methyl ribonucleotide
  modified_base 88: mod_base = OTHER; note = 2'-O-methyl ribonucleotide
  modified_base 89: mod_base = OTHER; note = 2'-O-methyl ribonucleotide
  modified_base 90: mod_base = OTHER; note = 2'-O-methyl ribonucleotide
  modified_base 91: mod_base = OTHER; note = 2'-O-methyl ribonucleotide
  modified_base 92: mod_base = OTHER; note = 2'-O-methyl ribonucleotide
  modified_base 93: mod_base = OTHER; note = 2'-O-methyl ribonucleotide
  modified_base 94: mod_base = OTHER; note = 2'-O-methyl ribonucleotide
  modified_base 95: mod_base = OTHER; note = 2'-O-methyl ribonucleotide
  modified_base 96: mod_base = OTHER; note = 2'-O-methyl ribonucleotide
  modified_base 97: mod_base = OTHER; note = 2'-O-methyl ribonucleotide
  modified_base 98: mod_base = OTHER; note = 2'-O-methyl ribonucleotide
  modified_base 99: mod_base = OTHER; note = 2'-O-methyl ribonucleotide
  modified_base 100: mod_base = OTHER; note = 2'-O-methyl ribonucleotide
  modified_base 101: mod_base = OTHER; note = uniform ribonucleotides (A, C, G, inosine or U), deoxynucleotides (A, G, C, inosine or T), ribonebularine, 2'-O-methylnebularine or deoxynebularine
  modified_base 102: mod_base = OTHER; note = uniform ribonucleotides (A, C, G, inosine or U), deoxynucleotides (A, G, C, inosine or T), ribonebularine, 2'-O-methylnebularine or deoxynebularine
  modified_base 103: mod_base = OTHER; note = uniform ribonucleotides (A, C, G, inosine or U), deoxynucleotides (A, G, C, inosine or T), ribonebularine, 2'-O-methylnebularine or deoxynebularine
  modified_base 1..4: mod_base = OTHER; note = phosphorothioate linkage
  modified_base 25..26: mod_base = OTHER; note = phosphorothioate linkage
  modified_base 45..46: mod_base = OTHER; note = phosphorothioate linkage
  modified_base 64..65: mod_base = OTHER; note = phosphorothioate linkage
  modified_base 98..100: mod_base = OTHER; note = phosphorothioate linkage
  misc_feature 1..100: note = RNA
  misc_feature 101..103: note = Optionally DNA or RNA

SEQ ID NO: 3054 - DNA, 103 bp, synthetic construct; identical to SEQ ID NO: 1796
  source 1..103: mol_type = other DNA
  modified_base 1: mod_base = OTHER; note = 2'-O-methyl ribonucleotide
  modified_base 2: mod_base = OTHER; note = 2'-O-methyl ribonucleotide
  modified_base 3: mod_base = OTHER; note = 2'-O-methyl ribonucleotide
  modified_base 21: mod_base = OTHER; note = 2'-O-methyl ribonucleotide
  modified_base 28: mod_base = OTHER; note = 2'-O-methyl ribonucleotide
  modified_base 29: mod_base = OTHER; note = 2'-O-methyl ribonucleotide
  modified_base 30: mod_base = OTHER; note = 2'-O-methyl ribonucleotide
  modified_base 31: mod_base = OTHER; note = 2'-O-methyl ribonucleotide
  modified_base 32: mod_base = OTHER; note = 2'-O-methyl ribonucleotide
  modified_base 34: mod_base = OTHER; note = 2'-O-methyl ribonucleotide
  modified_base 35: mod_base = OTHER; note = 2'-O-methyl ribonucleotide
  modified_base 36: mod_base = OTHER; note = 2'-O-methyl ribonucleotide
  modified_base 37: mod_base = OTHER; note = 2'-O-methyl ribonucleotide
  modified_base 38: mod_base = OTHER; note = 2'-O-methyl ribonucleotide
  modified_base 39: mod_base = OTHER; note = 2'-O-methyl ribonucleotide
  modified_base 40: mod_base = OTHER; note = 2'-O-methyl ribonucleotide
  modified_base 41: mod_base = OTHER; note = 2'-O-methyl ribonucleotide
  modified_base 42: mod_base = OTHER; note = 2'-O-methyl ribonucleotide
  modified_base 46: mod_base = OTHER; note = 2'-O-methyl ribonucleotide
  modified_base 48: mod_base = OTHER; note = 2'-O-methyl ribonucleotide
  modified_base 50: mod_base = OTHER; note = 2'-O-methyl ribonucleotide
  modified_base 52: mod_base = OTHER; note = 2'-O-methyl ribonucleotide
  modified_base 53: mod_base = OTHER; note = 2'-O-methyl ribonucleotide
  modified_base 54: mod_base = OTHER; note = 2'-O-methyl ribonucleotide
  modified_base 55: mod_base = OTHER; note = 2'-O-methyl ribonucleotide
  modified_base 56: mod_base = OTHER; note = 2'-O-methyl ribonucleotide
  modified_base 57: mod_base = OTHER; note = 2'-O-methyl ribonucleotide
  modified_base 60: mod_base = OTHER; note = 2'-O-methyl ribonucleotide
  modified_base 61: mod_base = OTHER; note = 2'-O-methyl ribonucleotide
  modified_base 66: mod_base = OTHER; note = 2'-O-methyl ribonucleotide
  modified_base 67: mod_base = OTHER; note = 2'-O-methyl ribonucleotide
  modified_base 70: mod_base = OTHER; note = 2'-O-methyl ribonucleotide
  modified_base 71: mod_base = OTHER; note = 2'-O-methyl ribonucleotide
  modified_base 72: mod_base = OTHER; note = 2'-O-methyl ribonucleotide
  modified_base 74: mod_base = OTHER; note = 2'-O-methyl ribonucleotide
  modified_base 75: mod_base = OTHER; note = 2'-O-methyl ribonucleotide
  modified_base 76: mod_base = OTHER; note = 2'-O-methyl ribonucleotide
  modified_base 77: mod_base = OTHER; note = 2'-O-methyl ribonucleotide
  modified_base 78: mod_base = OTHER; note = 2'-O-methyl ribonucleotide
  modified_base 79: mod_base = OTHER; note = 2'-O-methyl ribonucleotide
  modified_base 80: mod_base = OTHER; note = 2'-O-methyl ribonucleotide
  modified_base 81: mod_base = OTHER; note = 2'-O-methyl ribonucleotide
  modified_base 83: mod_base = OTHER; note = 2'-O-methyl ribonucleotide
  modified_base 84: mod_base = OTHER; note = 2'-O-methyl ribonucleotide
  modified_base 85: mod_base = OTHER; note = 2'-O-methyl ribonucleotide
  modified_base 86: mod_base = OTHER; note = 2'-O-methyl ribonucleotide
  modified_base 87: mod_base = OTHER; note = 2'-O-methyl ribonucleotide
  modified_base 88: mod_base = OTHER; note = 2'-O-methyl ribonucleotide
  modified_base 89: mod_base = OTHER; note = 2'-O-methyl ribonucleotide
  modified_base 90: mod_base = OTHER; note = 2'-O-methyl ribonucleotide
  modified_base 91: mod_base = OTHER; note = 2'-O-methyl ribonucleotide
  modified_base 92: mod_base = OTHER; note = 2'-O-methyl ribonucleotide
  modified_base 93: mod_base = OTHER; note = 2'-O-methyl ribonucleotide
  modified_base 94: mod_base = OTHER; note = 2'-O-methyl ribonucleotide
  modified_base 95: mod_base = OTHER; note = 2'-O-methyl ribonucleotide
  modified_base 96: mod_base = OTHER; note = 2'-O-methyl ribonucleotide
  modified_base 97: mod_base = OTHER; note = 2'-O-methyl ribonucleotide
  modified_base 98: mod_base = OTHER; note = 2'-O-methyl ribonucleotide
  modified_base 99: mod_base = OTHER; note = 2'-O-methyl ribonucleotide
  modified_base 100: mod_base = OTHER; note = 2'-O-methyl ribonucleotide
  modified_base 101: mod_base = OTHER; note = uniform ribonucleotides (A, C, G, inosine or U), deoxynucleotides (A, G, C, inosine or T), ribonebularine, 2'-O-methylnebularine or deoxynebularine
  modified_base 102: mod_base = OTHER; note = uniform ribonucleotides (A, C, G, inosine or U), deoxynucleotides (A, G, C, inosine or T), ribonebularine, 2'-O-methylnebularine or deoxynebularine
  modified_base 103: mod_base = OTHER; note = uniform ribonucleotides (A, C, G, inosine or U), deoxynucleotides (A, G, C, inosine or T), ribonebularine, 2'-O-methylnebularine or deoxynebularine
  modified_base 1..4: mod_base = OTHER; note = phosphorothioate linkage
  modified_base 25..26: mod_base = OTHER; note = phosphorothioate linkage
  modified_base 45..46: mod_base = OTHER; note = phosphorothioate linkage
  modified_base 64..65: mod_base = OTHER; note = phosphorothioate linkage
  modified_base 98..100: mod_base = OTHER; note = phosphorothioate linkage
  misc_feature 1..100: note = RNA
  misc_feature 101..103: note = Optionally DNA or RNA

SEQ ID NO: 3055 - DNA, 103 bp, synthetic construct; identical to SEQ ID NO: 1797
  source 1..103: mol_type = other DNA
  modified_base 1: mod_base = OTHER; note = 2'-O-methyl ribonucleotide
  modified_base 2: mod_base = OTHER; note = 2'-O-methyl ribonucleotide
  modified_base 3: mod_base = OTHER; note = 2'-O-methyl ribonucleotide
  modified_base 21: mod_base = OTHER; note = 2'-O-methyl ribonucleotide
  modified_base 28: mod_base = OTHER; note = 2'-O-methyl ribonucleotide
  modified_base 29: mod_base = OTHER; note = 2'-O-methyl ribonucleotide
  modified_base 30: mod_base = OTHER; note = 2'-O-methyl ribonucleotide
  modified_base 31: mod_base = OTHER; note = 2'-O-methyl ribonucleotide
  modified_base 32: mod_base = OTHER; note = 2'-O-methyl ribonucleotide
  modified_base 33: mod_base = OTHER; note = 2'-O-methyl ribonucleotide
  modified_base 34: mod_base = OTHER; note = 2'-O-methyl ribonucleotide
  modified_base 35: mod_base = OTHER; note = 2'-O-methyl ribonucleotide
  modified_base 36: mod_base = OTHER; note = 2'-O-methyl ribonucleotide
  modified_base 37: mod_base = OTHER; note = 2'-O-methyl ribonucleotide
  modified_base 38: mod_base = OTHER; note = 2'-O-methyl ribonucleotide
  modified_base 39: mod_base = OTHER; note = 2'-O-methyl ribonucleotide
  modified_base 40: mod_base = OTHER; note = 2'-O-methyl ribonucleotide
  modified_base 41: mod_base = OTHER; note = 2'-O-methyl ribonucleotide
  modified_base 42: mod_base = OTHER; note = 2'-O-methyl ribonucleotide
  modified_base 46: mod_base = OTHER; note = 2'-O-methyl ribonucleotide
  modified_base 48: mod_base = OTHER; note = 2'-O-methyl ribonucleotide
  modified_base 50: mod_base = OTHER; note = 2'-O-methyl ribonucleotide
  modified_base 52: mod_base = OTHER; note = 2'-O-methyl ribonucleotide
  modified_base 53: mod_base = OTHER; note = 2'-O-methyl ribonucleotide
  modified_base 54: mod_base = OTHER; note = 2'-O-methyl ribonucleotide
  modified_base 57: mod_base = OTHER; note = 2'-O-methyl ribonucleotide
  modified_base 61: mod_base = OTHER; note = 2'-O-methyl ribonucleotide
  modified_base 66: mod_base = OTHER; note = 2'-O-methyl ribonucleotide
  modified_base 67: mod_base = OTHER; note = 2'-O-methyl ribonucleotide
  modified_base 70: mod_base = OTHER; note = 2'-O-methyl ribonucleotide
  modified_base 71: mod_base = OTHER; note = 2'-O-methyl ribonucleotide
  modified_base 72: mod_base = OTHER; note = 2'-O-methyl ribonucleotide
  modified_base 74: mod_base = OTHER; note = 2'-O-methyl ribonucleotide
  modified_base 75: mod_base = OTHER; note = 2'-O-methyl ribonucleotide
  modified_base 76: mod_base = OTHER; note = 2'-O-methyl ribonucleotide
  modified_base 77: mod_base = OTHER; note = 2'-O-methyl ribonucleotide
  modified_base 78: mod_base = OTHER; note = 2'-O-methyl ribonucleotide
  modified_base 79: mod_base = OTHER; note = 2'-O-methyl ribonucleotide
  modified_base 80: mod_base = OTHER; note = 2'-O-methyl ribonucleotide
  modified_base 82: mod_base = OTHER; note = 2'-O-methyl ribonucleotide
  modified_base 83: mod_base = OTHER; note = 2'-O-methyl ribonucleotide
  modified_base 84: mod_base = OTHER; note = 2'-O-methyl ribonucleotide
  modified_base 85: mod_base = OTHER; note = 2'-O-methyl ribonucleotide
  modified_base 86: mod_base = OTHER; note = 2'-O-methyl ribonucleotide
  modified_base 87: mod_base = OTHER; note = 2'-O-methyl ribonucleotide
  modified_base 89: mod_base = OTHER; note = 2'-O-methyl ribonucleotide
  modified_base 92: mod_base = OTHER; note = 2'-O-methyl ribonucleotide
  modified_base 93: mod_base = OTHER; note = 2'-O-methyl ribonucleotide
  modified_base 94: mod_base = OTHER; note = 2'-O-methyl ribonucleotide
  modified_base 95: mod_base = OTHER; note = 2'-O-methyl ribonucleotide
  modified_base 96: mod_base = OTHER; note = 2'-O-methyl ribonucleotide
  modified_base 97: mod_base = OTHER; note = 2'-O-methyl ribonucleotide
  modified_base 98: mod_base = OTHER; note = 2'-O-methyl ribonucleotide
  modified_base 99: mod_base = OTHER; note = 2'-O-methyl ribonucleotide
  modified_base 100: mod_base = OTHER; note = 2'-O-methyl ribonucleotide
  modified_base 101: mod_base = OTHER; note = uniform ribonucleotides (A, C, G, inosine or U), deoxynucleotides (A, G, C, inosine or T), ribonebularine, 2'-O-methylnebularine or deoxynebularine
  modified_base 102: mod_base = OTHER; note = uniform ribonucleotides (A, C, G, inosine or U), deoxynucleotides (A, G, C, inosine or T), ribonebularine, 2'-O-methylnebularine or deoxynebularine
  modified_base 103: mod_base = OTHER; note = uniform ribonucleotides (A, C, G, inosine or U), deoxynucleotides (A, G, C, inosine or T), ribonebularine, 2'-O-methylnebularine or deoxynebularine
  modified_base 1..4: mod_base = OTHER; note = phosphorothioate linkage
  modified_base 25..26: mod_base = OTHER; note = phosphorothioate linkage
  modified_base 45..46: mod_base = OTHER; note = phosphorothioate linkage
  modified_base 64..65: mod_base = OTHER; note = phosphorothioate linkage
  modified_base 98..100: mod_base = OTHER; note = phosphorothioate linkage
  misc_feature 1..100: note = RNA
  misc_feature 101..103: note = Optionally DNA or RNA

SEQ ID NO: 3056 - DNA, 103 bp, synthetic construct; identical to SEQ ID NO: 1797
  source 1..103: mol_type = other DNA
  modified_base 1: mod_base = OTHER; note = 2'-O-methyl ribonucleotide
  modified_base 2: mod_base = OTHER; note = 2'-O-methyl ribonucleotide
  modified_base 3: mod_base = OTHER; note = 2'-O-methyl ribonucleotide
  modified_base 21: mod_base = OTHER; note = 2'-O-methyl ribonucleotide
  modified_base 28: mod_base = OTHER; note = 2'-O-methyl ribonucleotide
  modified_base 29: mod_base = OTHER; note = 2'-O-methyl ribonucleotide
  modified_base 30: mod_base = OTHER; note = 2'-O-methyl ribonucleotide
  modified_base 31: mod_base = OTHER; note = 2'-O-methyl ribonucleotide
  modified_base 32: mod_base = OTHER; note = 2'-O-methyl ribonucleotide
  modified_base 33: mod_base = OTHER; note = 2'-O-methyl ribonucleotide
  modified_base 34: mod_base = OTHER; note = 2'-O-methyl ribonucleotide
  modified_base 35: mod_base = OTHER; note = 2'-O-methyl ribonucleotide
  modified_base 36: mod_base = OTHER; note = 2'-O-methyl ribonucleotide
  modified_base 37: mod_base = OTHER; note = 2'-O-methyl ribonucleotide
  modified_base 38: mod_base = OTHER; note = 2'-O-methyl ribonucleotide
  modified_base 39: mod_base = OTHER; note = 2'-O-methyl ribonucleotide
  modified_base 40: mod_base = OTHER; note = 2'-O-methyl ribonucleotide
  modified_base 41: mod_base = OTHER; note = 2'-O-methyl ribonucleotide
  modified_base 42: mod_base = OTHER; note = 2'-O-methyl ribonucleotide
  modified_base 46: mod_base = OTHER; note = 2'-O-methyl ribonucleotide
  modified_base 48: mod_base = OTHER; note = 2'-O-methyl ribonucleotide
  modified_base 50: mod_base = OTHER; note = 2'-O-methyl ribonucleotide
  modified_base 52: mod_base = OTHER; note = 2'-O-methyl ribonucleotide
  modified_base 53: mod_base = OTHER; note = 2'-O-methyl ribonucleotide
  modified_base 54: mod_base = OTHER; note = 2'-O-methyl ribonucleotide
  modified_base 55: mod_base = OTHER; note = 2'-O-methyl ribonucleotide
  modified_base 56: mod_base = OTHER; note = 2'-O-methyl ribonucleotide
  modified_base 57: mod_base = OTHER; note = 2'-O-methyl ribonucleotide
  modified_base 60: mod_base = OTHER; note = 2'-O-methyl ribonucleotide
  modified_base 61: mod_base = OTHER; note = 2'-O-methyl ribonucleotide
  modified_base 66: mod_base = OTHER; note = 2'-O-methyl ribonucleotide
  modified_base 67: mod_base = OTHER; note = 2'-O-methyl ribonucleotide
  modified_base 70: mod_base = OTHER; note = 2'-O-methyl ribonucleotide
  modified_base 71: mod_base = OTHER; note = 2'-O-methyl ribonucleotide
  modified_base 72: mod_base = OTHER; note = 2'-O-methyl ribonucleotide
  modified_base 74: mod_base = OTHER; note = 2'-O-methyl ribonucleotide
  modified_base 75: mod_base = OTHER; note = 2'-O-methyl ribonucleotide
  modified_base 76: mod_base = OTHER; note = 2'-O-methyl ribonucleotide
  modified_base 77: mod_base = OTHER; note = 2'-O-methyl ribonucleotide
  modified_base 78: mod_base = OTHER; note = 2'-O-methyl ribonucleotide
  modified_base 79: mod_base = OTHER; note = 2'-O-methyl ribonucleotide
  modified_base 80: mod_base = OTHER; note = 2'-O-methyl ribonucleotide
  modified_base 82: mod_base = OTHER; note = 2'-O-methyl ribonucleotide
  modified_base 83: mod_base = OTHER; note = 2'-O-methyl ribonucleotide
  modified_base 84: mod_base = OTHER; note = 2'-O-methyl ribonucleotide
  modified_base 85: mod_base = OTHER; note = 2'-O-methyl ribonucleotide
  modified_base 86: mod_base = OTHER; note = 2'-O-methyl ribonucleotide
  modified_base 87: mod_base = OTHER; note = 2'-O-methyl ribonucleotide
  modified_base 89: mod_base = OTHER; note = 2'-O-methyl ribonucleotide
  modified_base 92: mod_base = OTHER; note = 2'-O-methyl ribonucleotide
  modified_base 93: mod_base = OTHER; note = 2'-O-methyl ribonucleotide
  modified_base 94: mod_base = OTHER; note = 2'-O-methyl ribonucleotide
  modified_base 95: mod_base = OTHER; note = 2'-O-methyl ribonucleotide
  modified_base 96: mod_base = OTHER; note = 2'-O-methyl ribonucleotide
  modified_base 97: mod_base = OTHER; note = 2'-O-methyl ribonucleotide
  modified_base 98: mod_base = OTHER; note = 2'-O-methyl ribonucleotide
  modified_base 99: mod_base = OTHER; note = 2'-O-methyl ribonucleotide
  modified_base 100: mod_base = OTHER; note = 2'-O-methyl ribonucleotide
  modified_base 101: mod_base = OTHER; note = uniform ribonucleotides (A, C, G, inosine or U), deoxynucleotides (A, G, C, inosine or T), ribonebularine, 2'-O-methylnebularine or deoxynebularine
  modified_base 102: mod_base = OTHER; note = uniform ribonucleotides (A, C, G, inosine or U), deoxynucleotides (A, G, C, inosine or T), ribonebularine, 2'-O-methylnebularine or deoxynebularine
  modified_base 103: mod_base = OTHER; note = uniform ribonucleotides (A, C, G, inosine or U), deoxynucleotides (A, G, C, inosine or T), ribonebularine, 2'-O-methylnebularine or deoxynebularine
  modified_base 1..4: mod_base = OTHER; note = phosphorothioate linkage
  modified_base 25..26: mod_base = OTHER; note = phosphorothioate linkage
  modified_base 45..46: mod_base = OTHER; note = phosphorothioate linkage
  modified_base 64..65: mod_base = OTHER; note = phosphorothioate linkage
  modified_base 98..100: mod_base = OTHER; note = phosphorothioate linkage
  misc_feature 1..100: note = RNA
  misc_feature 101..103: note = Optionally DNA or RNA

SEQ ID NO: 3057 - DNA, 103 bp, synthetic construct; identical to SEQ ID NO: 1797
  source 1..103: mol_type = other DNA
  modified_base 1: mod_base = OTHER; note = 2'-O-methyl ribonucleotide
  modified_base 2: mod_base = OTHER; note = 2'-O-methyl ribonucleotide
  modified_base 3: mod_base = OTHER; note = 2'-O-methyl ribonucleotide
  modified_base 21: mod_base = OTHER; note = 2'-O-methyl ribonucleotide
  modified_base 28: mod_base = OTHER; note = 2'-O-methyl ribonucleotide
  modified_base 29: mod_base = OTHER; note = 2'-O-methyl ribonucleotide
  modified_base 30: mod_base = OTHER; note = 2'-O-methyl ribonucleotide
  modified_base 31: mod_base = OTHER; note = 2'-O-methyl ribonucleotide
  modified_base 32: mod_base = OTHER; note = 2'-O-methyl ribonucleotide
  modified_base 33: mod_base = OTHER; note = 2'-O-methyl ribonucleotide
  modified_base 34: mod_base = OTHER; note = 2'-O-methyl ribonucleotide
  modified_base 35: mod_base = OTHER; note = 2'-O-methyl ribonucleotide
  modified_base 36: mod_base = OTHER; note = 2'-O-methyl ribonucleotide
  modified_base 37: mod_base = OTHER; note = 2'-O-methyl ribonucleotide
  modified_base 38: mod_base = OTHER; note = 2'-O-methyl ribonucleotide
  modified_base 39: mod_base = OTHER; note = 2'-O-methyl ribonucleotide
  modified_base 40: mod_base = OTHER; note = 2'-O-methyl ribonucleotide
  modified_base 41: mod_base = OTHER; note = 2'-O-methyl ribonucleotide
  modified_base 42: mod_base = OTHER; note = 2'-O-methyl ribonucleotide
  modified_base 46: mod_base = OTHER; note = 2'-O-methyl ribonucleotide
  modified_base 48: mod_base = OTHER; note = 2'-O-methyl ribonucleotide
  modified_base 50: mod_base = OTHER; note = 2'-O-methyl ribonucleotide
  modified_base 52: mod_base = OTHER; note = 2'-O-methyl ribonucleotide
  modified_base 53: mod_base = OTHER; note = 2'-O-methyl ribonucleotide
  modified_base 54: mod_base = OTHER; note = 2'-O-methyl ribonucleotide
  modified_base 57: mod_base = OTHER; note = 2'-O-methyl ribonucleotide
  modified_base 61: mod_base = OTHER; note = 2'-O-methyl ribonucleotide
  modified_base 66: mod_base = OTHER; note = 2'-O-methyl ribonucleotide
  modified_base 67: mod_base = OTHER; note = 2'-O-methyl ribonucleotide
  modified_base 70: mod_base = OTHER; note = 2'-O-methyl ribonucleotide
  modified_base 71: mod_base = OTHER; note = 2'-O-methyl ribonucleotide
  modified_base 72: mod_base = OTHER; note = 2'-O-methyl ribonucleotide
  modified_base 73: mod_base = OTHER; note = 2'-O-methyl ribonucleotide
  modified_base 74: mod_base = OTHER; note = 2'-O-methyl ribonucleotide
  modified_base 75: mod_base = OTHER; note = 2'-O-methyl ribonucleotide
  modified_base 76: mod_base = OTHER; note = 2'-O-methyl ribonucleotide
  modified_base 77: mod_base = OTHER; note = 2'-O-methyl ribonucleotide
  modified_base 78: mod_base = OTHER; note = 2'-O-methyl ribonucleotide
  modified_base 79: mod_base = OTHER; note = 2'-O-methyl ribonucleotide
  modified_base 80: mod_base = OTHER; note = 2'-O-methyl ribonucleotide
  modified_base 82: mod_base = OTHER; note = 2'-O-methyl ribonucleotide
  modified_base 83: mod_base = OTHER; note = 2'-O-methyl ribonucleotide
  modified_base 84: mod_base = OTHER; note = 2'-O-methyl ribonucleotide
  modified_base 85: mod_base = OTHER; note = 2'-O-methyl ribonucleotide
  modified_base 86: mod_base = OTHER; note = 2'-O-methyl ribonucleotide
  modified_base 87: mod_base = OTHER; note = 2'-O-methyl ribonucleotide
  modified_base 89: mod_base = OTHER; note = 2'-O-methyl ribonucleotide
  modified_base 92: mod_base = OTHER; note = 2'-O-methyl ribonucleotide
  modified_base 93: mod_base = OTHER; note = 2'-O-methyl ribonucleotide
  modified_base 94: mod_base = OTHER; note = 2'-O-methyl ribonucleotide
  modified_base 95: mod_base = OTHER; note = 2'-O-methyl ribonucleotide
  modified_base 96: mod_base = OTHER; note = 2'-O-methyl ribonucleotide
  modified_base 97: mod_base = OTHER; note = 2'-O-methyl ribonucleotide
  modified_base 98: mod_base = OTHER; note = 2'-O-methyl ribonucleotide
  modified_base 99: mod_base = OTHER; note = 2'-O-methyl ribonucleotide
  modified_base 100: mod_base = OTHER; note = 2'-O-methyl ribonucleotide
  modified_base 101: mod_base = OTHER; note = uniform ribonucleotides (A, C, G, inosine or U), deoxynucleotides (A, G, C, inosine or T), ribonebularine, 2'-O-methylnebularine or deoxynebularine
  modified_base 102: mod_base = OTHER; note = uniform ribonucleotides (A, C, G, inosine or U), deoxynucleotides (A, G, C, inosine or T), ribonebularine, 2'-O-methylnebularine or deoxynebularine
  modified_base 103: mod_base = OTHER; note = uniform ribonucleotides (A, C, G, inosine or U), deoxynucleotides (A, G, C, inosine or T), ribonebularine, 2'-O-methylnebularine or deoxynebularine
  modified_base 1..4: mod_base = OTHER; note = phosphorothioate linkage
  modified_base 25..26: mod_base = OTHER; note = phosphorothioate linkage
  modified_base 45..46: mod_base = OTHER; note = phosphorothioate linkage
  modified_base 64..65: mod_base = OTHER; note = phosphorothioate linkage
  modified_base 98..100: mod_base = OTHER; note = phosphorothioate linkage
  misc_feature 1..100: note = RNA
  misc_feature 101..103: note = Optionally DNA or RNA

SEQ ID NO: 3058 - DNA, 103 bp, synthetic construct; identical to SEQ ID NO: 1797
  source 1..103: mol_type = other DNA
  modified_base 1: mod_base = OTHER; note = 2'-O-methyl ribonucleotide
  modified_base 2: mod_base = OTHER; note = 2'-O-methyl ribonucleotide
  modified_base 3: mod_base = OTHER; note = 2'-O-methyl ribonucleotide
  modified_base 21: mod_base = OTHER; note = 2'-O-methyl ribonucleotide
  modified_base 28: mod_base = OTHER; note = 2'-O-methyl ribonucleotide
  modified_base 29: mod_base = OTHER; note = 2'-O-methyl ribonucleotide
  modified_base 30: mod_base = OTHER; note = 2'-O-methyl ribonucleotide
  modified_base 31: mod_base = OTHER; note = 2'-O-methyl ribonucleotide
  modified_base 32: mod_base = OTHER; note = 2'-O-methyl ribonucleotide
  modified_base 33: mod_base = OTHER; note = 2'-O-methyl ribonucleotide
  modified_base 34: mod_base = OTHER; note = 2'-O-methyl ribonucleotide
  modified_base 35: mod_base = OTHER; note = 2'-O-methyl ribonucleotide
  modified_base 36: mod_base = OTHER; note = 2'-O-methyl ribonucleotide
  modified_base 37: mod_base = OTHER; note = 2'-O-methyl ribonucleotide
  modified_base 38: mod_base = OTHER; note = 2'-O-methyl ribonucleotide
  modified_base 39: mod_base = OTHER; note = 2'-O-methyl ribonucleotide
  modified_base 40: mod_base = OTHER; note = 2'-O-methyl ribonucleotide
  modified_base 41: mod_base = OTHER; note = 2'-O-methyl ribonucleotide
  modified_base 42: mod_base = OTHER; note = 2'-O-methyl ribonucleotide
  modified_base 46: mod_base = OTHER; note = 2'-O-methyl ribonucleotide
  modified_base 48: mod_base = OTHER; note = 2'-O-methyl ribonucleotide
  modified_base 50: mod_base = OTHER; note = 2'-O-methyl ribonucleotide
  modified_base 52: mod_base = OTHER; note = 2'-O-methyl ribonucleotide
  modified_base 53: mod_base = OTHER; note = 2'-O-methyl ribonucleotide
  modified_base 54: mod_base = OTHER; note = 2'-O-methyl ribonucleotide
  modified_base 57: mod_base = OTHER; note = 2'-O-methyl ribonucleotide
  modified_base 61: mod_base = OTHER; note = 2'-O-methyl ribonucleotide
  modified_base 66: mod_base = OTHER; note = 2'-O-methyl ribonucleotide
  modified_base 67: mod_base = OTHER; note = 2'-O-methyl ribonucleotide
  modified_base 70: mod_base = OTHER; note = 2'-O-methyl ribonucleotide
  modified_base 71: mod_base = OTHER; note = 2'-O-methyl ribonucleotide
  modified_base 72: mod_base = OTHER; note = 2'-O-methyl ribonucleotide
  modified_base 73: mod_base = OTHER; note = 2'-O-methyl ribonucleotide
  modified_base 74: mod_base = OTHER; note = 2'-O-methyl ribonucleotide
  modified_base 75: mod_base = OTHER; note = 2'-O-methyl ribonucleotide
  modified_base 76: mod_base = OTHER; note = 2'-O-methyl ribonucleotide
  modified_base 77: mod_base = OTHER; note = 2'-O-methyl ribonucleotide
  modified_base 78: mod_base = OTHER; note = 2'-O-methyl ribonucleotide
  modified_base 79: mod_base = OTHER; note = 2'-O-methyl ribonucleotide
  modified_base 80: mod_base = OTHER; note = 2'-O-methyl ribonucleotide
  modified_base 82: mod_base = OTHER; note = 2'-O-methyl ribonucleotide
  modified_base 83: mod_base = OTHER; note = 2'-O-methyl ribonucleotide
  modified_base 84: mod_base = OTHER; note = 2'-O-methyl ribonucleotide
  modified_base 85: mod_base = OTHER; note = 2'-O-methyl ribonucleotide
  modified_base 86: mod_base = OTHER; note = 2'-O-methyl ribonucleotide
  modified_base 87: mod_base = OTHER; note = 2'-O-methyl ribonucleotide
  modified_base 89: mod_base = OTHER; note = 2'-O-methyl ribonucleotide
  modified_base 91: mod_base = OTHER; note = 2'-O-methyl ribonucleotide
  modified_base 92: mod_base = OTHER; note = 2'-O-methyl ribonucleotide
  modified_base 93: mod_base = OTHER; note = 2'-O-methyl ribonucleotide
  modified_base 94: mod_base = OTHER; note = 2'-O-methyl ribonucleotide
  modified_base 95: mod_base = OTHER; note = 2'-O-methyl ribonucleotide
  modified_base 96: mod_base = OTHER; note = 2'-O-methyl ribonucleotide
  modified_base 97: mod_base = OTHER; note = 2'-O-methyl ribonucleotide
  modified_base 98: mod_base = OTHER; note = 2'-O-methyl ribonucleotide
  modified_base 99: mod_base = OTHER; note = 2'-O-methyl ribonucleotide
  modified_base 100: mod_base = OTHER; note = 2'-O-methyl ribonucleotide
  modified_base 101: mod_base = OTHER; note = uniform ribonucleotides (A, C, G, inosine or U), deoxynucleotides (A, G, C, inosine or T), ribonebularine, 2'-O-methylnebularine or deoxynebularine
  modified_base 102: mod_base = OTHER; note = uniform ribonucleotides (A, C, G, inosine or U), deoxynucleotides (A, G, C, inosine or T), ribonebularine, 2'-O-methylnebularine or deoxynebularine
  modified_base 103: mod_base = OTHER; note = uniform ribonucleotides (A, C, G, inosine or U), deoxynucleotides (A, G, C, inosine or T), ribonebularine, 2'-O-methylnebularine or deoxynebularine
  modified_base 1..4: mod_base = OTHER; note = phosphorothioate linkage
  modified_base 25..26: mod_base = OTHER; note = phosphorothioate linkage
  modified_base 45..46: mod_base = OTHER; note = phosphorothioate linkage
  modified_base 64..65: mod_base = OTHER; note = phosphorothioate linkage
  modified_base 98..100: mod_base = OTHER; note = phosphorothioate linkage
  misc_feature 1..100: note = RNA
  misc_feature 101..103: note = Optionally DNA or RNA

SEQ ID NO: 3059 - DNA, 103 bp, synthetic construct; identical to SEQ ID NO: 1797
  source 1..103: mol_type = other DNA
  modified_base 1: mod_base = OTHER; note = 2'-O-methyl ribonucleotide
  modified_base 2: mod_base = OTHER; note = 2'-O-methyl ribonucleotide
  modified_base 3: mod_base = OTHER; note = 2'-O-methyl ribonucleotide
  modified_base 21: mod_base = OTHER; note = 2'-O-methyl ribonucleotide
  modified_base 28: mod_base = OTHER; note = 2'-O-methyl ribonucleotide
  modified_base 29: mod_base = OTHER; note = 2'-O-methyl ribonucleotide
  modified_base 30: mod_base = OTHER; note = 2'-O-methyl ribonucleotide
  modified_base 31: mod_base = OTHER; note = 2'-O-methyl ribonucleotide
  modified_base 32: mod_base = OTHER; note = 2'-O-methyl ribonucleotide
  modified_base 34: mod_base = OTHER; note = 2'-O-methyl ribonucleotide
  modified_base 35: mod_base = OTHER; note = 2'-O-methyl ribonucleotide
  modified_base 36: mod_base = OTHER; note = 2'-O-methyl ribonucleotide
  modified_base 37: mod_base = OTHER; note = 2'-O-methyl ribonucleotide
  modified_base 38: mod_base = OTHER; note = 2'-O-methyl ribonucleotide
  modified_base 39: mod_base = OTHER; note = 2'-O-methyl ribonucleotide
  modified_base 40: mod_base = OTHER; note = 2'-O-methyl ribonucleotide
  modified_base 41: mod_base = OTHER; note = 2'-O-methyl ribonucleotide
  modified_base 42: mod_base = OTHER; note = 2'-O-methyl ribonucleotide
  modified_base 46: mod_base = OTHER; note = 2'-O-methyl ribonucleotide
  modified_base 48: mod_base = OTHER; note = 2'-O-methyl ribonucleotide
  modified_base 50: mod_base = OTHER; note = 2'-O-methyl ribonucleotide
  modified_base 52: mod_base = OTHER; note = 2'-O-methyl ribonucleotide
  modified_base 53: mod_base = OTHER; note = 2'-O-methyl ribonucleotide
  modified_base 54: mod_base = OTHER; note = 2'-O-methyl ribonucleotide
  modified_base 57: mod_base = OTHER; note = 2'-O-methyl ribonucleotide
  modified_base 61: mod_base = OTHER; note = 2'-O-methyl ribonucleotide
  modified_base 66: mod_base = OTHER; note = 2'-O-methyl ribonucleotide
  modified_base 67: mod_base = OTHER; note = 2'-O-methyl ribonucleotide
  modified_base 70: mod_base = OTHER; note = 2'-O-methyl ribonucleotide
  modified_base 71: mod_base = OTHER; note = 2'-O-methyl ribonucleotide
  modified_base 72: mod_base = OTHER; note = 2'-O-methyl ribonucleotide
  modified_base 73: mod_base = OTHER; note = 2'-O-methyl ribonucleotide
  modified_base 74: mod_base = OTHER; note = 2'-O-methyl ribonucleotide
  modified_base 75: mod_base = OTHER; note = 2'-O-methyl ribonucleotide
  modified_base 76: mod_base = OTHER; note = 2'-O-methyl ribonucleotide
  modified_base 77: mod_base = OTHER; note = 2'-O-methyl ribonucleotide
  modified_base 78: mod_base = OTHER; note = 2'-O-methyl ribonucleotide
  modified_base 79: mod_base = OTHER; note = 2'-O-methyl ribonucleotide
  modified_base 80: mod_base = OTHER; note = 2'-O-methyl ribonucleotide
  modified_base 82: mod_base = OTHER; note = 2'-O-methyl ribonucleotide
  modified_base 83: mod_base = OTHER; note = 2'-O-methyl ribonucleotide
  modified_base 84: mod_base = OTHER; note = 2'-O-methyl ribonucleotide
  modified_base 85: mod_base = OTHER; note = 2'-O-methyl ribonucleotide
  modified_base 86: mod_base = OTHER; note = 2'-O-methyl ribonucleotide
  modified_base 87: mod_base = OTHER; note = 2'-O-methyl ribonucleotide
  modified_base 89: mod_base = OTHER; note = 2'-O-methyl ribonucleotide
  modified_base 92: mod_base = OTHER; note = 2'-O-methyl ribonucleotide
  modified_base 93: mod_base = OTHER; note = 2'-O-methyl ribonucleotide
  modified_base 94: mod_base = OTHER; note = 2'-O-methyl ribonucleotide
  modified_base 95: mod_base = OTHER; note = 2'-O-methyl ribonucleotide
  modified_base 96: mod_base = OTHER; note = 2'-O-methyl ribonucleotide
  modified_base 97: mod_base = OTHER; note = 2'-O-methyl ribonucleotide
  modified_base 98: mod_base = OTHER; note = 2'-O-methyl ribonucleotide
  modified_base 99: mod_base = OTHER; note = 2'-O-methyl ribonucleotide
  modified_base 100: mod_base = OTHER; note = 2'-O-methyl ribonucleotide
  modified_base 101: mod_base = OTHER; note = uniform ribonucleotides (A, C, G, inosine or U), deoxynucleotides (A, G, C, inosine or T), ribonebularine, 2'-O-methylnebularine or deoxynebularine
  modified_base 102: mod_base = OTHER; note = uniform ribonucleotides (A, C, G, inosine or U), deoxynucleotides (A, G, C, inosine or T), ribonebularine, 2'-O-methylnebularine or deoxynebularine
  modified_base 103: mod_base = OTHER; note = uniform ribonucleotides (A, C, G, inosine or U), deoxynucleotides (A, G, C, inosine or T), ribonebularine, 2'-O-methylnebularine or deoxynebularine
  modified_base 1..4: mod_base = OTHER; note = phosphorothioate linkage
  modified_base 25..26: mod_base = OTHER; note = phosphorothioate linkage
  modified_base 45..46: mod_base = OTHER; note = phosphorothioate linkage
  modified_base 64..65: mod_base = OTHER; note = phosphorothioate linkage
  modified_base 98..100: mod_base = OTHER; note = phosphorothioate linkage
  misc_feature 1..100: note = RNA
  misc_feature 101..103: note = Optionally DNA or RNA

SEQ ID NO: 3060 - DNA, 103 bp, synthetic construct; identical to SEQ ID NO: 1797
  source 1..103: mol_type = other DNA
  modified_base 1: mod_base = OTHER; note = 2'-O-methyl ribonucleotide
  modified_base 2: mod_base = OTHER; note = 2'-O-methyl ribonucleotide
  modified_base 3: mod_base = OTHER; note = 2'-O-methyl ribonucleotide
  modified_base 21: mod_base = OTHER; note = 2'-O-methyl ribonucleotide
  modified_base 28: mod_base = OTHER; note = 2'-O-methyl ribonucleotide
  modified_base 29: mod_base = OTHER; note = 2'-O-methyl ribonucleotide
  modified_base 30: mod_base = OTHER; note = 2'-O-methyl ribonucleotide
  modified_base 31: mod_base = OTHER; note = 2'-O-methyl ribonucleotide
  modified_base 32: mod_base = OTHER; note = 2'-O-methyl ribonucleotide
  modified_base 34: mod_base = OTHER; note = 2'-O-methyl ribonucleotide
  modified_base 35: mod_base = OTHER; note = 2'-O-methyl ribonucleotide
  modified_base 36: mod_base = OTHER; note = 2'-O-methyl ribonucleotide
  modified_base 37: mod_base = OTHER; note = 2'-O-methyl ribonucleotide
  modified_base 38: mod_base = OTHER; note = 2'-O-methyl ribonucleotide
  modified_base 39: mod_base = OTHER; note = 2'-O-methyl ribonucleotide
  modified_base 40: mod_base = OTHER; note = 2'-O-methyl ribonucleotide
  modified_base 41: mod_base = OTHER; note = 2'-O-methyl ribonucleotide
  modified_base 42: mod_base = OTHER; note = 2'-O-methyl ribonucleotide
  modified_base 46: mod_base = OTHER; note = 2'-O-methyl ribonucleotide
  modified_base 48: mod_base = OTHER; note = 2'-O-methyl ribonucleotide
  modified_base 50: mod_base = OTHER; note = 2'-O-methyl ribonucleotide
  modified_base 52: mod_base = OTHER; note = 2'-O-methyl ribonucleotide
  modified_base 53: mod_base = OTHER; note = 2'-O-methyl ribonucleotide
  modified_base 54: mod_base = OTHER; note = 2'-O-methyl ribonucleotide
  modified_base 57: mod_base = OTHER; note = 2'-O-methyl ribonucleotide
  modified_base 61: mod_base = OTHER; note = 2'-O-methyl ribonucleotide
  modified_base 66: mod_base = OTHER; note = 2'-O-methyl ribonucleotide
  modified_base 67: mod_base = OTHER; note = 2'-O-methyl ribonucleotide
  modified_base 70: mod_base = OTHER; note = 2'-O-methyl ribonucleotide
  modified_base 71: mod_base = OTHER; note = 2'-O-methyl ribonucleotide
  modified_base 72: mod_base = OTHER; note = 2'-O-methyl ribonucleotide
  modified_base 73: mod_base = OTHER; note = 2'-O-methyl ribonucleotide
  modified_base 74: mod_base = OTHER; note = 2'-O-methyl ribonucleotide
  modified_base 75: mod_base = OTHER; note = 2'-O-methyl ribonucleotide
  modified_base 76: mod_base = OTHER; note = 2'-O-methyl ribonucleotide
  modified_base 77: mod_base = OTHER; note = 2'-O-methyl ribonucleotide
  modified_base 78: mod_base = OTHER; note = 2'-O-methyl ribonucleotide
  modified_base 79: mod_base = OTHER; note = 2'-O-methyl ribonucleotide
  modified_base 80: mod_base = OTHER; note = 2'-O-methyl ribonucleotide
  modified_base 82: mod_base = OTHER; note = 2'-O-methyl ribonucleotide
  modified_base 83: mod_base = OTHER; note = 2'-O-methyl ribonucleotide
  modified_base 84: mod_base = OTHER; note = 2'-O-methyl ribonucleotide
  modified_base 85: mod_base = OTHER; note = 2'-O-methyl ribonucleotide
  modified_base 86: mod_base = OTHER; note = 2'-O-methyl ribonucleotide
  modified_base 87: mod_base = OTHER; note = 2'-O-methyl ribonucleotide
  modified_base 89: mod_base = OTHER; note = 2'-O-methyl ribonucleotide
  modified_base 91: mod_base = OTHER; note = 2'-O-methyl ribonucleotide
  modified_base 92: mod_base = OTHER; note = 2'-O-methyl ribonucleotide
  modified_base 93: mod_base = OTHER; note = 2'-O-methyl ribonucleotide
  modified_base 94: mod_base = OTHER; note = 2'-O-methyl ribonucleotide
  modified_base 95: mod_base = OTHER; note = 2'-O-methyl ribonucleotide
  modified_base 96: mod_base = OTHER; note = 2'-O-methyl ribonucleotide
  modified_base 97: mod_base = OTHER; note = 2'-O-methyl ribonucleotide
  modified_base 98: mod_base = OTHER; note = 2'-O-methyl ribonucleotide
  modified_base 99: mod_base = OTHER; note = 2'-O-methyl ribonucleotide
  modified_base 100: mod_base = OTHER; note = 2'-O-methyl ribonucleotide
  modified_base 101: mod_base = OTHER; note = uniform ribonucleotides (A, C, G, inosine or U), deoxynucleotides (A, G, C, inosine or T), ribonebularine, 2'-O-methylnebularine or deoxynebularine
  modified_base 102: mod_base = OTHER; note = uniform ribonucleotides (A, C, G, inosine or U), deoxynucleotides (A, G, C, inosine or T), ribonebularine, 2'-O-methylnebularine or deoxynebularine
  modified_base 103: mod_base = OTHER; note = uniform ribonucleotides (A, C, G, inosine or U), deoxynucleotides (A, G, C, inosine or T), ribonebularine, 2'-O-methylnebularine or deoxynebularine
  modified_base 1..4: mod_base = OTHER; note = phosphorothioate linkage
  modified_base 25..26: mod_base = OTHER; note = phosphorothioate linkage
  modified_base 45..46: mod_base = OTHER; note = phosphorothioate linkage
  modified_base 64..65: mod_base = OTHER; note = phosphorothioate linkage
  modified_base 98..100: mod_base = OTHER; note = phosphorothioate linkage
  misc_feature 1..100: note = RNA
  misc_feature 101..103: note = Optionally DNA or RNA

SEQ ID NO: 3061 - DNA, 103 bp, synthetic construct; identical to SEQ ID NO: 1797
  source 1..103: mol_type = other DNA
  modified_base 1: mod_base = OTHER; note = 2'-O-methyl ribonucleotide
  modified_base 2: mod_base = OTHER; note = 2'-O-methyl ribonucleotide
  modified_base 3: mod_base = OTHER; note = 2'-O-methyl ribonucleotide
  modified_base 21: mod_base = OTHER; note = 2'-O-methyl ribonucleotide
  modified_base 28: mod_base = OTHER; note = 2'-O-methyl ribonucleotide
  modified_base 29: mod_base = OTHER; note = 2'-O-methyl ribonucleotide
  modified_base 30: mod_base = OTHER; note = 2'-O-methyl ribonucleotide
  modified_base 31: mod_base = OTHER; note = 2'-O-methyl ribonucleotide
  modified_base 32: mod_base = OTHER; note = 2'-O-methyl ribonucleotide
  modified_base 34: mod_base = OTHER; note = 2'-O-methyl ribonucleotide
  modified_base 35: mod_base = OTHER; note = 2'-O-methyl ribonucleotide
  modified_base 36: mod_base = OTHER; note = 2'-O-methyl ribonucleotide
  modified_base 37: mod_base = OTHER; note = 2'-O-methyl ribonucleotide
  modified_base 38: mod_base = OTHER; note = 2'-O-methyl ribonucleotide
  modified_base 39: mod_base = OTHER; note = 2'-O-methyl ribonucleotide
  modified_base 40: mod_base = OTHER; note = 2'-O-methyl ribonucleotide
  modified_base 41: mod_base = OTHER; note = 2'-O-methyl ribonucleotide
  modified_base 42: mod_base = OTHER; note = 2'-O-methyl ribonucleotide
  modified_base 46: mod_base = OTHER; note = 2'-O-methyl ribonucleotide
  modified_base 48: mod_base = OTHER; note = 2'-O-methyl ribonucleotide
  modified_base 50: mod_base = OTHER; note = 2'-O-methyl ribonucleotide
  modified_base 52: mod_base = OTHER; note = 2'-O-methyl ribonucleotide
  modified_base 53: mod_base = OTHER; note = 2'-O-methyl ribonucleotide
  modified_base 54: mod_base = OTHER; note = 2'-O-methyl ribonucleotide
  modified_base 55: mod_base = OTHER; note = 2'-O-methyl ribonucleotide
  modified_base 56: mod_base = OTHER; note = 2'-O-methyl ribonucleotide
  modified_base 57: mod_base = OTHER; note = 2'-O-methyl ribonucleotide
  modified_base 60: mod_base = OTHER; note = 2'-O-methyl ribonucleotide
  modified_base 61: mod_base = OTHER; note = 2'-O-methyl ribonucleotide
  modified_base 66: mod_base = OTHER; note = 2'-O-methyl ribonucleotide
  modified_base 67: mod_base = OTHER; note = 2'-O-methyl ribonucleotide
  modified_base 70: mod_base = OTHER; note = 2'-O-methyl ribonucleotide
  modified_base 71: mod_base = OTHER; note = 2'-O-methyl ribonucleotide
  modified_base 72: mod_base = OTHER; note = 2'-O-methyl ribonucleotide
  modified_base 74: mod_base = OTHER; note = 2'-O-methyl ribonucleotide
  modified_base 75: mod_base = OTHER; note = 2'-O-methyl ribonucleotide
  modified_base 76: mod_base = OTHER; note = 2'-O-methyl ribonucleotide
  modified_base 77: mod_base = OTHER; note = 2'-O-methyl ribonucleotide
  modified_base 78: mod_base = OTHER; note = 2'-O-methyl ribonucleotide
  modified_base 79: mod_base = OTHER; note = 2'-O-methyl ribonucleotide
  modified_base 80: mod_base = OTHER; note = 2'-O-methyl ribonucleotide
  modified_base 82: mod_base = OTHER; note = 2'-O-methyl ribonucleotide
  modified_base 83: mod_base = OTHER; note = 2'-O-methyl ribonucleotide
  modified_base 84: mod_base = OTHER; note = 2'-O-methyl ribonucleotide
  modified_base 85: mod_base = OTHER; note = 2'-O-methyl ribonucleotide
  modified_base 86: mod_base = OTHER; note = 2'-O-methyl ribonucleotide
  modified_base 87: mod_base = OTHER; note = 2'-O-methyl ribonucleotide
  modified_base 89: mod_base = OTHER; note = 2'-O-methyl ribonucleotide
  modified_base 92: mod_base = OTHER; note = 2'-O-methyl ribonucleotide
  modified_base 93: mod_base = OTHER; note = 2'-O-methyl ribonucleotide
  modified_base 94: mod_base = OTHER; note = 2'-O-methyl ribonucleotide
  modified_base 95: mod_base = OTHER; note = 2'-O-methyl ribonucleotide
  modified_base 96: mod_base = OTHER; note = 2'-O-methyl ribonucleotide
  modified_base 97: mod_base = OTHER; note = 2'-O-methyl ribonucleotide
  modified_base 98: mod_base = OTHER; note = 2'-O-methyl ribonucleotide
  modified_base 99: mod_base = OTHER; note = 2'-O-methyl ribonucleotide
  modified_base 100: mod_base = OTHER; note = 2'-O-methyl ribonucleotide
  modified_base 101: mod_base = OTHER; note = uniform ribonucleotides (A, C, G, inosine or U), deoxynucleotides (A, G, C, inosine or T), ribonebularine, 2'-O-methylnebularine or deoxynebularine
  modified_base 102: mod_base = OTHER; note = uniform ribonucleotides (A, C, G, inosine or U), deoxynucleotides (A, G, C, inosine or T), ribonebularine, 2'-O-methylnebularine or deoxynebularine
  modified_base 103: mod_base = OTHER; note = uniform ribonucleotides (A, C, G, inosine or U), deoxynucleotides (A, G, C, inosine or T), ribonebularine, 2'-O-methylnebularine or deoxynebularine
  modified_base 1..4: mod_base = OTHER; note = phosphorothioate linkage
  modified_base 25..26: mod_base = OTHER; note = phosphorothioate linkage
  modified_base 45..46: mod_base = OTHER; note = phosphorothioate linkage
  modified_base 64..65: mod_base = OTHER; note = phosphorothioate linkage
  modified_base 98..100: mod_base = OTHER; note = phosphorothioate linkage
  misc_feature 1..100: note = RNA
  misc_feature 101..103: note = Optionally DNA or RNA

SEQ ID NO: 3062 - DNA, 103 bp, synthetic construct; identical to SEQ ID NO: 1797
  source 1..103: mol_type = other DNA
  modified_base 1: mod_base = OTHER; note = 2'-O-methyl ribonucleotide
  modified_base 2: mod_base = OTHER; note = 2'-O-methyl ribonucleotide
  modified_base 3: mod_base = OTHER; note = 2'-O-methyl ribonucleotide
  modified_base 21: mod_base = OTHER; note = 2'-O-methyl ribonucleotide
  modified_base 28: mod_base = OTHER; note = 2'-O-methyl ribonucleotide
  modified_base 29: mod_base = OTHER; note = 2'-O-methyl ribonucleotide
  modified_base 30: mod_base = OTHER; note = 2'-O-methyl ribonucleotide
  modified_base 31: mod_base = OTHER; note = 2'-O-methyl ribonucleotide
  modified_base 32: mod_base = OTHER; note = 2'-O-methyl ribonucleotide
  modified_base 34: mod_base = OTHER; note = 2'-O-methyl ribonucleotide
  modified_base 35: mod_base = OTHER; note = 2'-O-methyl ribonucleotide
  modified_base 36: mod_base = OTHER; note = 2'-O-methyl ribonucleotide
  modified_base 37: mod_base = OTHER; note = 2'-O-methyl ribonucleotide
  modified_base 38: mod_base = OTHER; note = 2'-O-methyl ribonucleotide
  modified_base 39: mod_base = OTHER; note = 2'-O-methyl ribonucleotide
  modified_base 40: mod_base = OTHER; note = 2'-O-methyl ribonucleotide
  modified_base 41: mod_base = OTHER; note = 2'-O-methyl ribonucleotide
  modified_base 42: mod_base = OTHER; note = 2'-O-methyl ribonucleotide
  modified_base 46: mod_base = OTHER; note = 2'-O-methyl ribonucleotide
  modified_base 48: mod_base = OTHER; note = 2'-O-methyl ribonucleotide
  modified_base 50: mod_base = OTHER; note = 2'-O-methyl ribonucleotide
  modified_base 52: mod_base = OTHER; note = 2'-O-methyl ribonucleotide
  modified_base 53: mod_base = OTHER; note = 2'-O-methyl ribonucleotide
  modified_base 54: mod_base = OTHER; note = 2'-O-methyl ribonucleotide
  modified_base 55: mod_base = OTHER; note = 2'-O-methyl ribonucleotide
  modified_base 56: mod_base = OTHER; note = 2'-O-methyl ribonucleotide
  modified_base 57: mod_base = OTHER; note = 2'-O-methyl ribonucleotide
  modified_base 60: mod_base = OTHER; note = 2'-O-methyl ribonucleotide
  modified_base 61: mod_base = OTHER; note = 2'-O-methyl ribonucleotide
  modified_base 66: mod_base = OTHER; note = 2'-O-methyl ribonucleotide
  modified_base 67: mod_base = OTHER; note = 2'-O-methyl ribonucleotide
  modified_base 70: mod_base = OTHER; note = 2'-O-methyl ribonucleotide
  modified_base 71: mod_base = OTHER; note = 2'-O-methyl ribonucleotide
  modified_base 72: mod_base = OTHER; note = 2'-O-methyl ribonucleotide
  modified_base 74: mod_base = OTHER; note = 2'-O-methyl ribonucleotide
  modified_base 75: mod_base = OTHER; note = 2'-O-methyl ribonucleotide
  modified_base 76: mod_base = OTHER; note = 2'-O-methyl ribonucleotide
  modified_base 77: mod_base = OTHER; note = 2'-O-methyl ribonucleotide
  modified_base 78: mod_base = OTHER; note = 2'-O-methyl ribonucleotide
  modified_base 79: mod_base = OTHER; note = 2'-O-methyl ribonucleotide
  modified_base 80: mod_base = OTHER; note = 2'-O-methyl ribonucleotide
  modified_base 81: mod_base = OTHER; note = 2'-O-methyl ribonucleotide
  modified_base 83: mod_base = OTHER; note = 2'-O-methyl ribonucleotide
  modified_base 84: mod_base = OTHER; note = 2'-O-methyl ribonucleotide
  modified_base 85: mod_base = OTHER; note = 2'-O-methyl ribonucleotide
  modified_base 86: mod_base = OTHER; note = 2'-O-methyl ribonucleotide
  modified_base 87: mod_base = OTHER; note = 2'-O-methyl ribonucleotide
  modified_base 88: mod_base = OTHER; note = 2'-O-methyl ribonucleotide
  modified_base 89: mod_base = OTHER; note = 2'-O-methyl ribonucleotide
  modified_base 90: mod_base = OTHER; note = 2'-O-methyl ribonucleotide
  modified_base 91: mod_base = OTHER; note = 2'-O-methyl ribonucleotide
  modified_base 92: mod_base = OTHER; note = 2'-O-methyl ribonucleotide
  modified_base 93: mod_base = OTHER; note = 2'-O-methyl ribonucleotide
  modified_base 94: mod_base = OTHER; note = 2'-O-methyl ribonucleotide
  modified_base 95: mod_base = OTHER; note = 2'-O-methyl ribonucleotide
  modified_base 96: mod_base = OTHER; note = 2'-O-methyl ribonucleotide
  modified_base 97: mod_base = OTHER; note = 2'-O-methyl ribonucleotide
  modified_base 98: mod_base = OTHER; note = 2'-O-methyl ribonucleotide
  modified_base 99: mod_base = OTHER; note = 2'-O-methyl ribonucleotide
  modified_base 100: mod_base = OTHER; note = 2'-O-methyl ribonucleotide
  modified_base 101: mod_base = OTHER; note = uniform ribonucleotides (A, C, G, inosine or U), deoxynucleotides (A, G, C, inosine or T), ribonebularine, 2'-O-methylnebularine or deoxynebularine
  modified_base 102: mod_base = OTHER; note = uniform ribonucleotides (A, C, G, inosine or U), deoxynucleotides (A, G, C, inosine or T), ribonebularine, 2'-O-methylnebularine or deoxynebularine
  modified_base 103: mod_base = OTHER; note = uniform ribonucleotides (A, C, G, inosine or U), deoxynucleotides (A, G, C, inosine or T), ribonebularine, 2'-O-methylnebularine or deoxynebularine
  modified_base 1..3: mod_base = OTHER; note = phosphorothioate linkage
  modified_base 98..100: mod_base = OTHER; note = phosphorothioate linkage
  misc_feature 1..100: note = RNA
  misc_feature 101..103: note = Optionally DNA or RNA

SEQ ID NO: 3063 - DNA, 103 bp, synthetic construct; identical to SEQ ID NO: 1797
  source 1..103: mol_type = other DNA
  modified_base 1: mod_base = OTHER; note = 2'-O-methyl ribonucleotide
  modified_base 2: mod_base = OTHER; note = 2'-O-methyl ribonucleotide
  modified_base 3: mod_base = OTHER; note = 2'-O-methyl ribonucleotide
  modified_base 21: mod_base = OTHER; note = 2'-O-methyl ribonucleotide
  modified_base 28: mod_base = OTHER; note = 2'-O-methyl ribonucleotide
  modified_base 29: mod_base = OTHER; note = 2'-O-methyl ribonucleotide
  modified_base 30: mod_base = OTHER; note = 2'-O-methyl ribonucleotide
  modified_base 31: mod_base = OTHER; note = 2'-O-methyl ribonucleotide
  modified_base 32: mod_base = OTHER; note = 2'-O-methyl ribonucleotide
  modified_base 33: mod_base = OTHER; note = 2'-O-methyl ribonucleotide
  modified_base 34: mod_base = OTHER; note = 2'-O-methyl ribonucleotide
  modified_base 35: mod_base = OTHER; note = 2'-O-methyl ribonucleotide
  modified_base 36: mod_base = OTHER; note = 2'-O-methyl ribonucleotide
  modified_base 37: mod_base = OTHER; note = 2'-O-methyl ribonucleotide
  modified_base 38: mod_base = OTHER; note = 2'-O-methyl ribonucleotide
  modified_base 39: mod_base = OTHER; note = 2'-O-methyl ribonucleotide
  modified_base 40: mod_base = OTHER; note = 2'-O-methyl ribonucleotide
  modified_base 41: mod_base = OTHER; note = 2'-O-methyl ribonucleotide
  modified_base 42: mod_base = OTHER; note = 2'-O-methyl ribonucleotide
  modified_base 46: mod_base = OTHER; note = 2'-O-methyl ribonucleotide
  modified_base 48: mod_base = OTHER; note = 2'-O-methyl ribonucleotide
  modified_base 50: mod_base = OTHER; note = 2'-O-methyl ribonucleotide
  modified_base 52: mod_base = OTHER; note = 2'-O-methyl ribonucleotide
  modified_base 53: mod_base = OTHER; note = 2'-O-methyl ribonucleotide
  modified_base 54: mod_base = OTHER; note = 2'-O-methyl ribonucleotide
  modified_base 57: mod_base = OTHER; note = 2'-O-methyl ribonucleotide
  modified_base 61: mod_base = OTHER; note = 2'-O-methyl ribonucleotide
  modified_base 66: mod_base = OTHER; note = 2'-O-methyl ribonucleotide
  modified_base 67: mod_base = OTHER; note = 2'-O-methyl ribonucleotide
  modified_base 70: mod_base = OTHER; note = 2'-O-methyl ribonucleotide
  modified_base 71: mod_base = OTHER; note = 2'-O-methyl ribonucleotide
  modified_base 72: mod_base = OTHER; note = 2'-O-methyl ribonucleotide
  modified_base 74: mod_base = OTHER; note = 2'-O-methyl ribonucleotide
  modified_base 75: mod_base = OTHER; note = 2'-O-methyl ribonucleotide
  modified_base 76: mod_base = OTHER; note = 2'-O-methyl ribonucleotide
  modified_base 77: mod_base = OTHER; note = 2'-O-methyl ribonucleotide
  modified_base 78: mod_base = OTHER; note = 2'-O-methyl ribonucleotide
  modified_base 79: mod_base = OTHER; note = 2'-O-methyl ribonucleotide
  modified_base 80: mod_base = OTHER; note = 2'-O-methyl ribonucleotide
  modified_base 82: mod_base = OTHER; note = 2'-O-methyl ribonucleotide
  modified_base 83: mod_base = OTHER; note = 2'-O-methyl ribonucleotide
  modified_base 84: mod_base = OTHER; note = 2'-O-methyl ribonucleotide
  modified_base 85: mod_base = OTHER; note = 2'-O-methyl ribonucleotide
  modified_base 86: mod_base = OTHER; note = 2'-O-methyl ribonucleotide
  modified_base 87: mod_base = OTHER; note = 2'-O-methyl ribonucleotide
  modified_base 89: mod_base = OTHER; note = 2'-O-methyl ribonucleotide
  modified_base 92: mod_base = OTHER; note = 2'-O-methyl ribonucleotide
  modified_base 93: mod_base = OTHER; note = 2'-O-methyl ribonucleotide
  modified_base 94: mod_base = OTHER; note = 2'-O-methyl ribonucleotide
  modified_base 95: mod_base = OTHER; note = 2'-O-methyl ribonucleotide
  modified_base 96: mod_base = OTHER; note = 2'-O-methyl ribonucleotide
  modified_base 97: mod_base = OTHER; note = 2'-O-methyl ribonucleotide
  modified_base 98: mod_base = OTHER; note = 2'-O-methyl ribonucleotide
  modified_base 99: mod_base = OTHER; note = 2'-O-methyl ribonucleotide
  modified_base 100: mod_base = OTHER; note = 2'-O-methyl ribonucleotide
  modified_base 101: mod_base = OTHER; note = uniform ribonucleotides (A, C, G, inosine or U), deoxynucleotides (A, G, C, inosine or T), ribonebularine, 2'-O-methylnebularine or deoxynebularine
  modified_base 102: mod_base = OTHER; note = uniform ribonucleotides (A, C, G, inosine or U), deoxynucleotides (A, G, C, inosine or T), ribonebularine, 2'-O-methylnebularine or deoxynebularine
  modified_base 103: mod_base = OTHER; note = uniform ribonucleotides (A, C, G, inosine or U), deoxynucleotides (A, G, C, inosine or T), ribonebularine, 2'-O-methylnebularine or deoxynebularine
  modified_base 1..3: mod_base = OTHER; note = phosphorothioate linkage
  modified_base 98..100: mod_base = OTHER; note = phosphorothioate linkage
  misc_feature 1..100: note = RNA
  misc_feature 101..103: note = Optionally DNA or RNA

SEQ ID NO: 3064 - DNA, 103 bp, synthetic construct; identical to SEQ ID NO: 1797
  source 1..103: mol_type = other DNA
  modified_base 1: mod_base = OTHER; note = 2'-O-methyl ribonucleotide
  modified_base 2: mod_base = OTHER; note = 2'-O-methyl ribonucleotide
  modified_base 3: mod_base = OTHER; note = 2'-O-methyl ribonucleotide
  modified_base 21: mod_base = OTHER; note = 2'-O-methyl ribonucleotide
  modified_base 28: mod_base = OTHER; note = 2'-O-methyl ribonucleotide
  modified_base 29: mod_base = OTHER; note = 2'-O-methyl ribonucleotide
  modified_base 30: mod_base = OTHER; note = 2'-O-methyl ribonucleotide
  modified_base 31: mod_base = OTHER; note = 2'-O-methyl ribonucleotide
  modified_base 32: mod_base = OTHER; note = 2'-O-methyl ribonucleotide
  modified_base 33: mod_base = OTHER; note = 2'-O-methyl ribonucleotide
  modified_base 34: mod_base = OTHER; note = 2'-O-methyl ribonucleotide
  modified_base 35: mod_base = OTHER; note = 2'-O-methyl ribonucleotide
  modified_base 36: mod_base = OTHER; note = 2'-O-methyl ribonucleotide
  modified_base 37: mod_base = OTHER; note = 2'-O-methyl ribonucleotide
  modified_base 38: mod_base = OTHER; note = 2'-O-methyl ribonucleotide
  modified_base 39: mod_base = OTHER; note = 2'-O-methyl ribonucleotide
  modified_base 40: mod_base = OTHER; note = 2'-O-methyl ribonucleotide
  modified_base 41: mod_base = OTHER; note = 2'-O-methyl ribonucleotide
  modified_base 42: mod_base = OTHER; note = 2'-O-methyl ribonucleotide
  modified_base 46: mod_base = OTHER; note = 2'-O-methyl ribonucleotide
  modified_base 48: mod_base = OTHER; note = 2'-O-methyl ribonucleotide
  modified_base 50: mod_base = OTHER; note = 2'-O-methyl ribonucleotide
  modified_base 52: mod_base = OTHER; note = 2'-O-methyl ribonucleotide
  modified_base 53: mod_base = OTHER; note = 2'-O-methyl ribonucleotide
  modified_base 54: mod_base = OTHER; note = 2'-O-methyl ribonucleotide
  modified_base 55: mod_base = OTHER; note = 2'-O-methyl ribonucleotide
  modified_base 56: mod_base = OTHER; note = 2'-O-methyl ribonucleotide
  modified_base 57: mod_base = OTHER; note = 2'-O-methyl ribonucleotide
  modified_base 60: mod_base = OTHER; note = 2'-O-methyl ribonucleotide
  modified_base 61: mod_base = OTHER; note = 2'-O-methyl ribonucleotide
  modified_base 66: mod_base = OTHER; note = 2'-O-methyl ribonucleotide
  modified_base 67: mod_base = OTHER; note = 2'-O-methyl ribonucleotide
  modified_base 70: mod_base = OTHER; note = 2'-O-methyl ribonucleotide
  modified_base 71: mod_base = OTHER; note = 2'-O-methyl ribonucleotide
  modified_base 72: mod_base = OTHER; note = 2'-O-methyl ribonucleotide
  modified_base 74: mod_base = OTHER; note = 2'-O-methyl ribonucleotide
  modified_base 75: mod_base = OTHER; note = 2'-O-methyl ribonucleotide
  modified_base 76: mod_base = OTHER; note = 2'-O-methyl ribonucleotide
  modified_base 77: mod_base = OTHER; note = 2'-O-methyl ribonucleotide
  modified_base 78: mod_base = OTHER; note = 2'-O-methyl ribonucleotide
  modified_base 79: mod_base = OTHER; note = 2'-O-methyl ribonucleotide
  modified_base 80: mod_base = OTHER; note = 2'-O-methyl ribonucleotide
  modified_base 82: mod_base = OTHER; note = 2'-O-methyl ribonucleotide
  modified_base 83: mod_base = OTHER; note = 2'-O-methyl ribonucleotide
  modified_base 84: mod_base = OTHER; note = 2'-O-methyl ribonucleotide
  modified_base 85: mod_base = OTHER; note = 2'-O-methyl ribonucleotide
  modified_base 86: mod_base = OTHER; note = 2'-O-methyl ribonucleotide
  modified_base 87: mod_base = OTHER; note = 2'-O-methyl ribonucleotide
  modified_base 89: mod_base = OTHER; note = 2'-O-methyl ribonucleotide
  modified_base 92: mod_base = OTHER; note = 2'-O-methyl ribonucleotide
  modified_base 93: mod_base = OTHER; note = 2'-O-methyl ribonucleotide
  modified_base 94: mod_base = OTHER; note = 2'-O-methyl ribonucleotide
  modified_base 95: mod_base = OTHER; note = 2'-O-methyl ribonucleotide
  modified_base 96: mod_base = OTHER; note = 2'-O-methyl ribonucleotide
  modified_base 97: mod_base = OTHER; note = 2'-O-methyl ribonucleotide
  modified_base 98: mod_base = OTHER; note = 2'-O-methyl ribonucleotide
  modified_base 99: mod_base = OTHER; note = 2'-O-methyl ribonucleotide
  modified_base 100: mod_base = OTHER; note = 2'-O-methyl ribonucleotide
  modified_base 101: mod_base = OTHER; note = uniform ribonucleotides (A, C, G, inosine or U), deoxynucleotides (A, G, C, inosine or T), ribonebularine, 2'-O-methylnebularine or deoxynebularine
  modified_base 102: mod_base = OTHER; note = uniform ribonucleotides (A, C, G, inosine or U), deoxynucleotides (A, G, C, inosine or T), ribonebularine, 2'-O-methylnebularine or deoxynebularine
  modified_base 103: mod_base = OTHER; note = uniform ribonucleotides (A, C, G, inosine or U), deoxynucleotides (A, G, C, inosine or T), ribonebularine, 2'-O-methylnebularine or deoxynebularine
  modified_base 1..3: mod_base = OTHER; note = phosphorothioate linkage
  modified_base 98..100: mod_base = OTHER; note = phosphorothioate linkage
  misc_feature 1..100: note = RNA
  misc_feature 101..103: note = Optionally DNA or RNA

SEQ ID NO: 3065 - DNA, 103 bp, synthetic construct; identical to SEQ ID NO: 1797
  source 1..103: mol_type = other DNA
  modified_base 1: mod_base = OTHER; note = 2'-O-methyl ribonucleotide
  modified_base 2: mod_base = OTHER; note = 2'-O-methyl ribonucleotide
  modified_base 3: mod_base = OTHER; note = 2'-O-methyl ribonucleotide
  modified_base 21: mod_base = OTHER; note = 2'-O-methyl ribonucleotide
  modified_base 28: mod_base = OTHER; note = 2'-O-methyl ribonucleotide
  modified_base 29: mod_base = OTHER; note = 2'-O-methyl ribonucleotide
  modified_base 30: mod_base = OTHER; note = 2'-O-methyl ribonucleotide
  modified_base 31: mod_base = OTHER; note = 2'-O-methyl ribonucleotide
  modified_base 32: mod_base = OTHER; note = 2'-O-methyl ribonucleotide
  modified_base 33: mod_base = OTHER; note = 2'-O-methyl ribonucleotide
  modified_base 34: mod_base = OTHER; note = 2'-O-methyl ribonucleotide
  modified_base 35: mod_base = OTHER; note = 2'-O-methyl ribonucleotide
  modified_base 36: mod_base = OTHER; note = 2'-O-methyl ribonucleotide
  modified_base 37: mod_base = OTHER; note = 2'-O-methyl ribonucleotide
  modified_base 38: mod_base = OTHER; note = 2'-O-methyl ribonucleotide
  modified_base 39: mod_base = OTHER; note = 2'-O-methyl ribonucleotide
  modified_base 40: mod_base = OTHER; note = 2'-O-methyl ribonucleotide
  modified_base 41: mod_base = OTHER; note = 2'-O-methyl ribonucleotide
  modified_base 42: mod_base = OTHER; note = 2'-O-methyl ribonucleotide
  modified_base 46: mod_base = OTHER; note = 2'-O-methyl ribonucleotide
  modified_base 48: mod_base = OTHER; note = 2'-O-methyl ribonucleotide
  modified_base 50: mod_base = OTHER; note = 2'-O-methyl ribonucleotide
  modified_base 52: mod_base = OTHER; note = 2'-O-methyl ribonucleotide
  modified_base 53: mod_base = OTHER; note = 2'-O-methyl ribonucleotide
  modified_base 54: mod_base = OTHER; note = 2'-O-methyl ribonucleotide
  modified_base 57: mod_base = OTHER; note = 2'-O-methyl ribonucleotide
  modified_base 61: mod_base = OTHER; note = 2'-O-methyl ribonucleotide
  modified_base 66: mod_base = OTHER; note = 2'-O-methyl ribonucleotide
  modified_base 67: mod_base = OTHER; note = 2'-O-methyl ribonucleotide
  modified_base 70: mod_base = OTHER; note = 2'-O-methyl ribonucleotide
  modified_base 71: mod_base = OTHER; note = 2'-O-methyl ribonucleotide
  modified_base 72: mod_base = OTHER; note = 2'-O-methyl ribonucleotide
  modified_base 73: mod_base = OTHER; note = 2'-O-methyl ribonucleotide
  modified_base 74: mod_base = OTHER; note = 2'-O-methyl ribonucleotide
  modified_base 75: mod_base = OTHER; note = 2'-O-methyl ribonucleotide
  modified_base 76: mod_base = OTHER; note = 2'-O-methyl ribonucleotide
  modified_base 77: mod_base = OTHER; note = 2'-O-methyl ribonucleotide
  modified_base 78: mod_base = OTHER; note = 2'-O-methyl ribonucleotide
  modified_base 79: mod_base = OTHER; note = 2'-O-methyl ribonucleotide
  modified_base 80: mod_base = OTHER; note = 2'-O-methyl ribonucleotide
  modified_base 82: mod_base = OTHER; note = 2'-O-methyl ribonucleotide
  modified_base 83: mod_base = OTHER; note = 2'-O-methyl ribonucleotide
  modified_base 84: mod_base = OTHER; note = 2'-O-methyl ribonucleotide
  modified_base 85: mod_base = OTHER; note = 2'-O-methyl ribonucleotide
  modified_base 86: mod_base = OTHER; note = 2'-O-methyl ribonucleotide
  modified_base 87: mod_base = OTHER; note = 2'-O-methyl ribonucleotide
  modified_base 89: mod_base = OTHER; note = 2'-O-methyl ribonucleotide
  modified_base 92: mod_base = OTHER; note = 2'-O-methyl ribonucleotide
  modified_base 93: mod_base = OTHER; note = 2'-O-methyl ribonucleotide
  modified_base 94: mod_base = OTHER; note = 2'-O-methyl ribonucleotide
  modified_base 95: mod_base = OTHER; note = 2'-O-methyl ribonucleotide
  modified_base 96: mod_base = OTHER; note = 2'-O-methyl ribonucleotide
  modified_base 97: mod_base = OTHER; note = 2'-O-methyl ribonucleotide
  modified_base 98: mod_base = OTHER; note = 2'-O-methyl ribonucleotide
  modified_base 99: mod_base = OTHER; note = 2'-O-methyl ribonucleotide
  modified_base 100: mod_base = OTHER; note = 2'-O-methyl ribonucleotide
  modified_base 101: mod_base = OTHER; note = uniform ribonucleotides (A, C, G, inosine or U), deoxynucleotides (A, G, C, inosine or T), ribonebularine, 2'-O-methylnebularine or deoxynebularine
  modified_base 102: mod_base = OTHER; note = uniform ribonucleotides (A, C, G, inosine or U), deoxynucleotides (A, G, C, inosine or T), ribonebularine, 2'-O-methylnebularine or deoxynebularine
  modified_base 103: mod_base = OTHER; note = uniform ribonucleotides (A, C, G, inosine or U), deoxynucleotides (A, G, C, inosine or T), ribonebularine, 2'-O-methylnebularine or deoxynebularine
  modified_base 1..3: mod_base = OTHER; note = phosphorothioate linkage
  modified_base 98..100: mod_base = OTHER; note = phosphorothioate linkage
  misc_feature 1..100: note = RNA
  misc_feature 101..103: note = Optionally DNA or RNA

SEQ ID NO: 3066 - DNA, 103 bp, synthetic construct; identical to SEQ ID NO: 1797
  source 1..103: mol_type = other DNA
  modified_base 1: mod_base = OTHER; note = 2'-O-methyl ribonucleotide
  modified_base 2: mod_base = OTHER; note = 2'-O-methyl ribonucleotide
  modified_base 3: mod_base = OTHER; note = 2'-O-methyl ribonucleotide
  modified_base 21: mod_base = OTHER; note = 2'-O-methyl ribonucleotide
  modified_base 28: mod_base = OTHER; note = 2'-O-methyl ribonucleotide
  modified_base 29: mod_base = OTHER; note = 2'-O-methyl ribonucleotide
  modified_base 30: mod_base = OTHER; note = 2'-O-methyl ribonucleotide
  modified_base 31: mod_base = OTHER; note = 2'-O-methyl ribonucleotide
  modified_base 32: mod_base = OTHER; note = 2'-O-methyl ribonucleotide
  modified_base 33: mod_base = OTHER; note = 2'-O-methyl ribonucleotide
  modified_base 34: mod_base = OTHER; note = 2'-O-methyl ribonucleotide
  modified_base 35: mod_base = OTHER; note = 2'-O-methyl ribonucleotide
  modified_base 36: mod_base = OTHER; note = 2'-O-methyl ribonucleotide
  modified_base 37: mod_base = OTHER; note = 2'-O-methyl ribonucleotide
  modified_base 38: mod_base = OTHER; note = 2'-O-methyl ribonucleotide
  modified_base 39: mod_base = OTHER; note = 2'-O-methyl ribonucleotide
  modified_base 40: mod_base = OTHER; note = 2'-O-methyl ribonucleotide
  modified_base 41: mod_base = OTHER; note = 2'-O-methyl ribonucleotide
  modified_base 42: mod_base = OTHER; note = 2'-O-methyl ribonucleotide
  modified_base 46: mod_base = OTHER; note = 2'-O-methyl ribonucleotide
  modified_base 48: mod_base = OTHER; note = 2'-O-methyl ribonucleotide
  modified_base 50: mod_base = OTHER; note = 2'-O-methyl ribonucleotide
  modified_base 52: mod_base = OTHER; note = 2'-O-methyl ribonucleotide
  modified_base 53: mod_base = OTHER; note = 2'-O-methyl ribonucleotide
  modified_base 54: mod_base = OTHER; note = 2'-O-methyl ribonucleotide
  modified_base 57: mod_base = OTHER; note = 2'-O-methyl ribonucleotide
  modified_base 61: mod_base = OTHER; note = 2'-O-methyl ribonucleotide
  modified_base 66: mod_base = OTHER; note = 2'-O-methyl ribonucleotide
  modified_base 67: mod_base = OTHER; note = 2'-O-methyl ribonucleotide
  modified_base 70: mod_base = OTHER; note = 2'-O-methyl ribonucleotide
  modified_base 71: mod_base = OTHER; note = 2'-O-methyl ribonucleotide
  modified_base 72: mod_base = OTHER; note = 2'-O-methyl ribonucleotide
  modified_base 73: mod_base = OTHER; note = 2'-O-methyl ribonucleotide
  modified_base 74: mod_base = OTHER; note = 2'-O-methyl ribonucleotide
  modified_base 75: mod_base = OTHER; note = 2'-O-methyl ribonucleotide
  modified_base 76: mod_base = OTHER; note = 2'-O-methyl ribonucleotide
  modified_base 77: mod_base = OTHER; note = 2'-O-methyl ribonucleotide
  modified_base 78: mod_base = OTHER; note = 2'-O-methyl ribonucleotide
  modified_base 79: mod_base = OTHER; note = 2'-O-methyl ribonucleotide
  modified_base 80: mod_base = OTHER; note = 2'-O-methyl ribonucleotide
  modified_base 82: mod_base = OTHER; note = 2'-O-methyl ribonucleotide
  modified_base 83: mod_base = OTHER; note = 2'-O-methyl ribonucleotide
  modified_base 84: mod_base = OTHER; note = 2'-O-methyl ribonucleotide
  modified_base 85: mod_base = OTHER; note = 2'-O-methyl ribonucleotide
  modified_base 86: mod_base = OTHER; note = 2'-O-methyl ribonucleotide
  modified_base 87: mod_base = OTHER; note = 2'-O-methyl ribonucleotide
  modified_base 89: mod_base = OTHER; note = 2'-O-methyl ribonucleotide
  modified_base 91: mod_base = OTHER; note = 2'-O-methyl ribonucleotide
  modified_base 92: mod_base = OTHER; note = 2'-O-methyl ribonucleotide
  modified_base 93: mod_base = OTHER; note = 2'-O-methyl ribonucleotide
  modified_base 94: mod_base = OTHER; note = 2'-O-methyl ribonucleotide
  modified_base 95: mod_base = OTHER; note = 2'-O-methyl ribonucleotide
  modified_base 96: mod_base = OTHER; note = 2'-O-methyl ribonucleotide
  modified_base 97: mod_base = OTHER; note = 2'-O-methyl ribonucleotide
  modified_base 98: mod_base = OTHER; note = 2'-O-methyl ribonucleotide
  modified_base 99: mod_base = OTHER; note = 2'-O-methyl ribonucleotide
  modified_base 100: mod_base = OTHER; note = 2'-O-methyl ribonucleotide
  modified_base 101: mod_base = OTHER; note = uniform ribonucleotides (A, C, G, inosine or U), deoxynucleotides (A, G, C, inosine or T), ribonebularine, 2'-O-methylnebularine or deoxynebularine
  modified_base 102: mod_base = OTHER; note = uniform ribonucleotides (A, C, G, inosine or U), deoxynucleotides (A, G, C, inosine or T), ribonebularine, 2'-O-methylnebularine or deoxynebularine
  modified_base 103: mod_base = OTHER; note = uniform ribonucleotides (A, C, G, inosine or U), deoxynucleotides (A, G, C, inosine or T), ribonebularine, 2'-O-methylnebularine or deoxynebularine
  modified_base 1..3: mod_base = OTHER; note = phosphorothioate linkage
  modified_base 98..100: mod_base = OTHER; note = phosphorothioate linkage
  misc_feature 1..100: note = RNA
  misc_feature 101..103: note = Optionally DNA or RNA

SEQ ID NO: 3067 - DNA, 103 bp, synthetic construct; identical to SEQ ID NO: 1797
  source 1..103: mol_type = other DNA
  modified_base 1: mod_base = OTHER; note = 2'-O-methyl ribonucleotide
  modified_base 2: mod_base = OTHER; note = 2'-O-methyl ribonucleotide
  modified_base 3: mod_base = OTHER; note = 2'-O-methyl ribonucleotide
  modified_base 21: mod_base = OTHER; note = 2'-O-methyl ribonucleotide
  modified_base 28: mod_base = OTHER; note = 2'-O-methyl ribonucleotide
  modified_base 29: mod_base = OTHER; note = 2'-O-methyl ribonucleotide
  modified_base 30: mod_base = OTHER; note = 2'-O-methyl ribonucleotide
  modified_base 31: mod_base = OTHER; note = 2'-O-methyl ribonucleotide
  modified_base 32: mod_base = OTHER; note = 2'-O-methyl ribonucleotide
  modified_base 34: mod_base = OTHER; note = 2'-O-methyl ribonucleotide
  modified_base 35: mod_base = OTHER; note = 2'-O-methyl ribonucleotide
  modified_base 36: mod_base = OTHER; note = 2'-O-methyl ribonucleotide
  modified_base 37: mod_base = OTHER; note = 2'-O-methyl ribonucleotide
  modified_base 38: mod_base = OTHER; note = 2'-O-methyl ribonucleotide
  modified_base 39: mod_base = OTHER; note = 2'-O-methyl ribonucleotide
  modified_base 40: mod_base = OTHER; note = 2'-O-methyl ribonucleotide
  modified_base 41: mod_base = OTHER; note = 2'-O-methyl ribonucleotide
  modified_base 42: mod_base = OTHER; note = 2'-O-methyl ribonucleotide
  modified_base 46: mod_base = OTHER; note = 2'-O-methyl ribonucleotide
  modified_base 48: mod_base = OTHER; note = 2'-O-methyl ribonucleotide
  modified_base 50: mod_base = OTHER; note = 2'-O-methyl ribonucleotide
  modified_base 52: mod_base = OTHER; note = 2'-O-methyl ribonucleotide
  modified_base 53: mod_base = OTHER; note = 2'-O-methyl ribonucleotide
  modified_base 54: mod_base = OTHER; note = 2'-O-methyl ribonucleotide
  modified_base 57: mod_base = OTHER; note = 2'-O-methyl ribonucleotide
  modified_base 61: mod_base = OTHER; note = 2'-O-methyl ribonucleotide
  modified_base 66: mod_base = OTHER; note = 2'-O-methyl ribonucleotide
  modified_base 67: mod_base = OTHER; note = 2'-O-methyl ribonucleotide
  modified_base 70: mod_base = OTHER; note = 2'-O-methyl ribonucleotide
  modified_base 71: mod_base = OTHER; note = 2'-O-methyl ribonucleotide
  modified_base 72: mod_base = OTHER; note = 2'-O-methyl ribonucleotide
  modified_base 73: mod_base = OTHER; note = 2'-O-methyl ribonucleotide
  modified_base 74: mod_base = OTHER; note = 2'-O-methyl ribonucleotide
  modified_base 75: mod_base = OTHER; note = 2'-O-methyl ribonucleotide
  modified_base 76: mod_base = OTHER; note = 2'-O-methyl ribonucleotide
  modified_base 77: mod_base = OTHER; note = 2'-O-methyl ribonucleotide
  modified_base 78: mod_base = OTHER; note = 2'-O-methyl ribonucleotide
  modified_base 79: mod_base = OTHER; note = 2'-O-methyl ribonucleotide
  modified_base 80: mod_base = OTHER; note = 2'-O-methyl ribonucleotide
  modified_base 82: mod_base = OTHER; note = 2'-O-methyl ribonucleotide
  modified_base 83: mod_base = OTHER; note = 2'-O-methyl ribonucleotide
  modified_base 84: mod_base = OTHER; note = 2'-O-methyl ribonucleotide
  modified_base 85: mod_base = OTHER; note = 2'-O-methyl ribonucleotide
  modified_base 86: mod_base = OTHER; note = 2'-O-methyl ribonucleotide
  modified_base 87: mod_base = OTHER; note = 2'-O-methyl ribonucleotide
  modified_base 89: mod_base = OTHER; note = 2'-O-methyl ribonucleotide
  modified_base 92: mod_base = OTHER; note = 2'-O-methyl ribonucleotide
  modified_base 93: mod_base = OTHER; note = 2'-O-methyl ribonucleotide
  modified_base 94: mod_base = OTHER; note = 2'-O-methyl ribonucleotide
  modified_base 95: mod_base = OTHER; note = 2'-O-methyl ribonucleotide
  modified_base 96: mod_base = OTHER; note = 2'-O-methyl ribonucleotide
  modified_base 97: mod_base = OTHER; note = 2'-O-methyl ribonucleotide
  modified_base 98: mod_base = OTHER; note = 2'-O-methyl ribonucleotide
  modified_base 99: mod_base = OTHER; note = 2'-O-methyl ribonucleotide
  modified_base 100: mod_base = OTHER; note = 2'-O-methyl ribonucleotide
  modified_base 101: mod_base = OTHER; note = uniform ribonucleotides (A, C, G, inosine or U), deoxynucleotides (A, G, C, inosine or T), ribonebularine, 2'-O-methylnebularine or deoxynebularine
  modified_base 102: mod_base = OTHER; note = uniform ribonucleotides (A, C, G, inosine or U), deoxynucleotides (A, G, C, inosine or T), ribonebularine, 2'-O-methylnebularine or deoxynebularine
  modified_base 103: mod_base = OTHER; note = uniform ribonucleotides (A, C, G, inosine or U), deoxynucleotides (A, G, C, inosine or T), ribonebularine, 2'-O-methylnebularine or deoxynebularine
  modified_base 1..3: mod_base = OTHER; note = phosphorothioate linkage
  modified_base 98..100: mod_base = OTHER; note = phosphorothioate linkage
  misc_feature 1..100: note = RNA
  misc_feature 101..103: note = Optionally DNA or RNA

SEQ ID NO: 3068 - DNA, 103 bp, synthetic construct; identical to SEQ ID NO: 1797
  source 1..103: mol_type = other DNA
  modified_base 1: mod_base = OTHER; note = 2'-O-methyl ribonucleotide
  modified_base 2: mod_base = OTHER; note = 2'-O-methyl ribonucleotide
  modified_base 3: mod_base = OTHER; note = 2'-O-methyl ribonucleotide
  modified_base 21: mod_base = OTHER; note = 2'-O-methyl ribonucleotide
  modified_base 28: mod_base = OTHER; note = 2'-O-methyl ribonucleotide
  modified_base 29: mod_base = OTHER; note = 2'-O-methyl ribonucleotide
  modified_base 30: mod_base = OTHER; note = 2'-O-methyl ribonucleotide
  modified_base 31: mod_base = OTHER; note = 2'-O-methyl ribonucleotide
  modified_base 32: mod_base = OTHER; note = 2'-O-methyl ribonucleotide
  modified_base 34: mod_base = OTHER; note = 2'-O-methyl ribonucleotide
  modified_base 35: mod_base = OTHER; note = 2'-O-methyl ribonucleotide
  modified_base 36: mod_base = OTHER; note = 2'-O-methyl ribonucleotide
  modified_base 37: mod_base = OTHER; note = 2'-O-methyl ribonucleotide
  modified_base 38: mod_base = OTHER; note = 2'-O-methyl ribonucleotide
  modified_base 39: mod_base = OTHER; note = 2'-O-methyl ribonucleotide
  modified_base 40: mod_base = OTHER; note = 2'-O-methyl ribonucleotide
  modified_base 41: mod_base = OTHER; note = 2'-O-methyl ribonucleotide
  modified_base 42: mod_base = OTHER; note = 2'-O-methyl ribonucleotide
  modified_base 46: mod_base = OTHER; note = 2'-O-methyl ribonucleotide
  modified_base 48: mod_base = OTHER; note = 2'-O-methyl ribonucleotide
  modified_base 50: mod_base = OTHER; note = 2'-O-methyl ribonucleotide
  modified_base 52: mod_base = OTHER; note = 2'-O-methyl ribonucleotide
  modified_base 53: mod_base = OTHER; note = 2'-O-methyl ribonucleotide
  modified_base 54: mod_base = OTHER; note = 2'-O-methyl ribonucleotide
  modified_base 57: mod_base = OTHER; note = 2'-O-methyl ribonucleotide
  modified_base 61: mod_base = OTHER; note = 2'-O-methyl ribonucleotide
  modified_base 66: mod_base = OTHER; note = 2'-O-methyl ribonucleotide
  modified_base 67: mod_base = OTHER; note = 2'-O-methyl ribonucleotide
  modified_base 70: mod_base = OTHER; note = 2'-O-methyl ribonucleotide
  modified_base 71: mod_base = OTHER; note = 2'-O-methyl ribonucleotide
  modified_base 72: mod_base = OTHER; note = 2'-O-methyl ribonucleotide
  modified_base 73: mod_base = OTHER; note = 2'-O-methyl ribonucleotide
  modified_base 74: mod_base = OTHER; note = 2'-O-methyl ribonucleotide
  modified_base 75: mod_base = OTHER; note = 2'-O-methyl ribonucleotide
  modified_base 76: mod_base = OTHER; note = 2'-O-methyl ribonucleotide
  modified_base 77: mod_base = OTHER; note = 2'-O-methyl ribonucleotide
  modified_base 78: mod_base = OTHER; note = 2'-O-methyl ribonucleotide
  modified_base 79: mod_base = OTHER; note = 2'-O-methyl ribonucleotide
  modified_base 80: mod_base = OTHER; note = 2'-O-methyl ribonucleotide
  modified_base 82: mod_base = OTHER; note = 2'-O-methyl ribonucleotide
  modified_base 83: mod_base = OTHER; note = 2'-O-methyl ribonucleotide
  modified_base 84: mod_base = OTHER; note = 2'-O-methyl ribonucleotide
  modified_base 85: mod_base = OTHER; note = 2'-O-methyl ribonucleotide
  modified_base 86: mod_base = OTHER; note = 2'-O-methyl ribonucleotide
  modified_base 87: mod_base = OTHER; note = 2'-O-methyl ribonucleotide
  modified_base 89: mod_base = OTHER; note = 2'-O-methyl ribonucleotide
  modified_base 91: mod_base = OTHER; note = 2'-O-methyl ribonucleotide
  modified_base 92: mod_base = OTHER; note = 2'-O-methyl ribonucleotide
  modified_base 93: mod_base = OTHER; note = 2'-O-methyl ribonucleotide
  modified_base 94: mod_base = OTHER; note = 2'-O-methyl ribonucleotide
  modified_base 95: mod_base = OTHER; note = 2'-O-methyl ribonucleotide
  modified_base 96: mod_base = OTHER; note = 2'-O-methyl ribonucleotide
  modified_base 97: mod_base = OTHER; note = 2'-O-methyl ribonucleotide
  modified_base 98: mod_base = OTHER; note = 2'-O-methyl ribonucleotide
  modified_base 99: mod_base = OTHER; note = 2'-O-methyl ribonucleotide
  modified_base 100: mod_base = OTHER; note = 2'-O-methyl ribonucleotide
  modified_base 101: mod_base = OTHER; note = uniform ribonucleotides (A, C, G, inosine or U), deoxynucleotides (A, G, C, inosine or T), ribonebularine, 2'-O-methylnebularine or deoxynebularine
  modified_base 102: mod_base = OTHER; note = uniform ribonucleotides (A, C, G, inosine or U), deoxynucleotides (A, G, C, inosine or T), ribonebularine, 2'-O-methylnebularine or deoxynebularine
  modified_base 103: mod_base = OTHER; note = uniform ribonucleotides (A, C, G, inosine or U), deoxynucleotides (A, G, C, inosine or T), ribonebularine, 2'-O-methylnebularine or deoxynebularine
  modified_base 1..3: mod_base = OTHER; note = phosphorothioate linkage
  modified_base 98..100: mod_base = OTHER; note = phosphorothioate linkage
  misc_feature 1..100: note = RNA
  misc_feature 101..103: note = Optionally DNA or RNA

SEQ ID NO: 3069 - DNA, 103 bp, synthetic construct; identical to SEQ ID NO: 1797
  source 1..103: mol_type = other DNA
  modified_base 1: mod_base = OTHER; note = 2'-O-methyl ribonucleotide
  modified_base 2: mod_base = OTHER; note = 2'-O-methyl ribonucleotide
  modified_base 3: mod_base = OTHER; note = 2'-O-methyl ribonucleotide
  modified_base 21: mod_base = OTHER; note = 2'-O-methyl ribonucleotide
  modified_base 28: mod_base = OTHER; note = 2'-O-methyl ribonucleotide
  modified_base 29: mod_base = OTHER; note = 2'-O-methyl ribonucleotide
  modified_base 30: mod_base = OTHER; note = 2'-O-methyl ribonucleotide
  modified_base 31: mod_base = OTHER; note = 2'-O-methyl ribonucleotide
  modified_base 32: mod_base = OTHER; note = 2'-O-methyl ribonucleotide
  modified_base 34: mod_base = OTHER; note = 2'-O-methyl ribonucleotide
  modified_base 35: mod_base = OTHER; note = 2'-O-methyl ribonucleotide
  modified_base 36: mod_base = OTHER; note = 2'-O-methyl ribonucleotide
  modified_base 37: mod_base = OTHER; note = 2'-O-methyl ribonucleotide
  modified_base 38: mod_base = OTHER; note = 2'-O-methyl ribonucleotide
  modified_base 39: mod_base = OTHER; note = 2'-O-methyl ribonucleotide
  modified_base 40: mod_base = OTHER; note = 2'-O-methyl ribonucleotide
  modified_base 41: mod_base = OTHER; note = 2'-O-methyl ribonucleotide
  modified_base 42: mod_base = OTHER; note = 2'-O-methyl ribonucleotide
  modified_base 46: mod_base = OTHER; note = 2'-O-methyl ribonucleotide
  modified_base 48: mod_base = OTHER; note = 2'-O-methyl ribonucleotide
  modified_base 50: mod_base = OTHER; note = 2'-O-methyl ribonucleotide
  modified_base 52: mod_base = OTHER; note = 2'-O-methyl ribonucleotide
  modified_base 53: mod_base = OTHER; note = 2'-O-methyl ribonucleotide
  modified_base 54: mod_base = OTHER; note = 2'-O-methyl ribonucleotide
  modified_base 55: mod_base = OTHER; note = 2'-O-methyl ribonucleotide
  modified_base 56: mod_base = OTHER; note = 2'-O-methyl ribonucleotide
  modified_base 57: mod_base = OTHER; note = 2'-O-methyl ribonucleotide
  modified_base 60: mod_base = OTHER; note = 2'-O-methyl ribonucleotide
  modified_base 61: mod_base = OTHER; note = 2'-O-methyl ribonucleotide
  modified_base 66: mod_base = OTHER; note = 2'-O-methyl ribonucleotide
  modified_base 67: mod_base = OTHER; note = 2'-O-methyl ribonucleotide
  modified_base 70: mod_base = OTHER; note = 2'-O-methyl ribonucleotide
  modified_base 71: mod_base = OTHER; note = 2'-O-methyl ribonucleotide
  modified_base 72: mod_base = OTHER; note = 2'-O-methyl ribonucleotide
  modified_base 74: mod_base = OTHER; note = 2'-O-methyl ribonucleotide
  modified_base 75: mod_base = OTHER; note = 2'-O-methyl ribonucleotide
  modified_base 76: mod_base = OTHER; note = 2'-O-methyl ribonucleotide
  modified_base 77: mod_base = OTHER; note = 2'-O-methyl ribonucleotide
  modified_base 78: mod_base = OTHER; note = 2'-O-methyl ribonucleotide
  modified_base 79: mod_base = OTHER; note = 2'-O-methyl ribonucleotide
  modified_base 80: mod_base = OTHER; note = 2'-O-methyl ribonucleotide
  modified_base 82: mod_base = OTHER; note = 2'-O-methyl ribonucleotide
  modified_base 83: mod_base = OTHER; note = 2'-O-methyl ribonucleotide
  modified_base 84: mod_base = OTHER; note = 2'-O-methyl ribonucleotide
  modified_base 85: mod_base = OTHER; note = 2'-O-methyl ribonucleotide
  modified_base 86: mod_base = OTHER; note = 2'-O-methyl ribonucleotide
  modified_base 87: mod_base = OTHER; note = 2'-O-methyl ribonucleotide
  modified_base 89: mod_base = OTHER; note = 2'-O-methyl ribonucleotide
  modified_base 92: mod_base = OTHER; note = 2'-O-methyl ribonucleotide
  modified_base 93: mod_base = OTHER; note = 2'-O-methyl ribonucleotide
  modified_base 94: mod_base = OTHER; note = 2'-O-methyl ribonucleotide
  modified_base 95: mod_base = OTHER; note = 2'-O-methyl ribonucleotide
  modified_base 96: mod_base = OTHER; note = 2'-O-methyl ribonucleotide
  modified_base 97: mod_base = OTHER; note = 2'-O-methyl ribonucleotide
  modified_base 98: mod_base = OTHER; note = 2'-O-methyl ribonucleotide
  modified_base 99: mod_base = OTHER; note = 2'-O-methyl ribonucleotide
  modified_base 100: mod_base = OTHER; note = 2'-O-methyl ribonucleotide
  modified_base 101: mod_base = OTHER; note = uniform ribonucleotides (A, C, G, inosine or U), deoxynucleotides (A, G, C, inosine or T), ribonebularine, 2'-O-methylnebularine or deoxynebularine
  modified_base 102: mod_base = OTHER; note = uniform ribonucleotides (A, C, G, inosine or U), deoxynucleotides (A, G, C, inosine or T), ribonebularine, 2'-O-methylnebularine or deoxynebularine
  modified_base 103: mod_base = OTHER; note = uniform ribonucleotides (A, C, G, inosine or U), deoxynucleotides (A, G, C, inosine or T), ribonebularine, 2'-O-methylnebularine or deoxynebularine
  modified_base 1..3: mod_base = OTHER; note = phosphorothioate linkage
  modified_base 98..100: mod_base = OTHER; note = phosphorothioate linkage
  misc_feature 1..100: note = RNA
  misc_feature 101..103: note = Optionally DNA or RNA

SEQ ID NO: 3070 - DNA, 103 bp, synthetic construct; identical to SEQ ID NO: 1795
  source 1..103: mol_type = other DNA
  modified_base 1: mod_base = OTHER; note = 2'-O-methyl ribonucleotide
  modified_base 2: mod_base = OTHER; note = 2'-O-methyl ribonucleotide
  modified_base 3: mod_base = OTHER; note = 2'-O-methyl ribonucleotide
  modified_base 21: mod_base = OTHER; note = 2'-O-methyl ribonucleotide
  modified_base 28: mod_base = OTHER; note = 2'-O-methyl ribonucleotide
  modified_base 29: mod_base = OTHER; note = 2'-O-methyl ribonucleotide
  modified_base 30: mod_base = OTHER; note = 2'-O-methyl ribonucleotide
  modified_base 31: mod_base = OTHER; note = 2'-O-methyl ribonucleotide
  modified_base 32: mod_base = OTHER; note = 2'-O-methyl ribonucleotide
  modified_base 33: mod_base = OTHER; note = 2'-O-methyl ribonucleotide
  modified_base 34: mod_base = OTHER; note = 2'-O-methyl ribonucleotide
  modified_base 35: mod_base = OTHER; note = 2'-O-methyl ribonucleotide
  modified_base 36: mod_base = OTHER; note = 2'-O-methyl ribonucleotide
  modified_base 37: mod_base = OTHER; note = 2'-O-methyl ribonucleotide
  modified_base 38: mod_base = OTHER; note = 2'-O-methyl ribonucleotide
  modified_base 39: mod_base = OTHER; note = 2'-O-methyl ribonucleotide
  modified_base 40: mod_base = OTHER; note = 2'-O-methyl ribonucleotide
  modified_base 41: mod_base = OTHER; note = 2'-O-methyl ribonucleotide
  modified_base 42: mod_base = OTHER; note = 2'-O-methyl ribonucleotide
  modified_base 46: mod_base = OTHER; note = 2'-O-methyl ribonucleotide
  modified_base 48: mod_base = OTHER; note = 2'-O-methyl ribonucleotide
  modified_base 50: mod_base = OTHER; note = 2'-O-methyl ribonucleotide
  modified_base 52: mod_base = OTHER; note = 2'-O-methyl ribonucleotide
  modified_base 53: mod_base = OTHER; note = 2'-O-methyl ribonucleotide
  modified_base 54: mod_base = OTHER; note = 2'-O-methyl ribonucleotide
  modified_base 55: mod_base = OTHER; note = 2'-O-methyl ribonucleotide
  modified_base 56: mod_base = OTHER; note = 2'-O-methyl ribonucleotide
  modified_base 57: mod_base = OTHER; note = 2'-O-methyl ribonucleotide
  modified_base 60: mod_base = OTHER; note = 2'-O-methyl ribonucleotide
  modified_base 61: mod_base = OTHER; note = 2'-O-methyl ribonucleotide
  modified_base 66: mod_base = OTHER; note = 2'-O-methyl ribonucleotide
  modified_base 67: mod_base = OTHER; note = 2'-O-methyl ribonucleotide
  modified_base 70: mod_base = OTHER; note = 2'-O-methyl ribonucleotide
  modified_base 71: mod_base = OTHER; note = 2'-O-methyl ribonucleotide
  modified_base 72: mod_base = OTHER; note = 2'-O-methyl ribonucleotide
  modified_base 73: mod_base = OTHER; note = 2'-O-methyl ribonucleotide
  modified_base 74: mod_base = OTHER; note = 2'-O-methyl ribonucleotide
  modified_base 75: mod_base = OTHER; note = 2'-O-methyl ribonucleotide
  modified_base 76: mod_base = OTHER; note = 2'-O-methyl ribonucleotide
  modified_base 77: mod_base = OTHER; note = 2'-O-methyl ribonucleotide
  modified_base 78: mod_base = OTHER; note = 2'-O-methyl ribonucleotide
  modified_base 79: mod_base = OTHER; note = 2'-O-methyl ribonucleotide
  modified_base 80: mod_base = OTHER; note = 2'-O-methyl ribonucleotide
  modified_base 81: mod_base = OTHER; note = 2'-O-methyl ribonucleotide
  modified_base 83: mod_base = OTHER; note = 2'-O-methyl ribonucleotide
  modified_base 84: mod_base = OTHER; note = 2'-O-methyl ribonucleotide
  modified_base 85: mod_base = OTHER; note = 2'-O-methyl ribonucleotide
  modified_base 86: mod_base = OTHER; note = 2'-O-methyl ribonucleotide
  modified_base 87: mod_base = OTHER; note = 2'-O-methyl ribonucleotide
  modified_base 88: mod_base = OTHER; note = 2'-O-methyl ribonucleotide
  modified_base 89: mod_base = OTHER; note = 2'-O-methyl ribonucleotide
  modified_base 90: mod_base = OTHER; note = 2'-O-methyl ribonucleotide
  modified_base 91: mod_base = OTHER; note = 2'-O-methyl ribonucleotide
  modified_base 92: mod_base = OTHER; note = 2'-O-methyl ribonucleotide
  modified_base 93: mod_base = OTHER; note = 2'-O-methyl ribonucleotide
  modified_base 94: mod_base = OTHER; note = 2'-O-methyl ribonucleotide
  modified_base 95: mod_base = OTHER; note = 2'-O-methyl ribonucleotide
  modified_base 96: mod_base = OTHER; note = 2'-O-methyl ribonucleotide
  modified_base 97: mod_base = OTHER; note = 2'-O-methyl ribonucleotide
  modified_base 98: mod_base = OTHER; note = 2'-O-methyl ribonucleotide
  modified_base 99: mod_base = OTHER; note = 2'-O-methyl ribonucleotide
  modified_base 100: mod_base = OTHER; note = 2'-O-methyl ribonucleotide
  modified_base 101: mod_base = OTHER; note = uniform ribonucleotides (A, C, G, inosine or U), deoxynucleotides (A, G, C, inosine or T), ribonebularine, 2'-O-methylnebularine or deoxynebularine
  modified_base 102: mod_base = OTHER; note = uniform ribonucleotides (A, C, G, inosine or U), deoxynucleotides (A, G, C, inosine or T), ribonebularine, 2'-O-methylnebularine or deoxynebularine
  modified_base 103: mod_base = OTHER; note = uniform ribonucleotides (A, C, G, inosine or U), deoxynucleotides (A, G, C, inosine or T), ribonebularine, 2'-O-methylnebularine or deoxynebularine
  modified_base 1..3: mod_base = OTHER; note = phosphorothioate linkage
  modified_base 98..100: mod_base = OTHER; note = phosphorothioate linkage
  misc_feature 1..100: note = RNA
  misc_feature 101..103: note = Optionally DNA or RNA

SEQ ID NO: 3071 - DNA, 103 bp, synthetic construct; identical to SEQ ID NO: 1795
  source 1..103: mol_type = other DNA
  modified_base 1: mod_base = OTHER; note = 2'-O-methyl ribonucleotide
  modified_base 2: mod_base = OTHER; note = 2'-O-methyl ribonucleotide
  modified_base 3: mod_base = OTHER; note = 2'-O-methyl ribonucleotide
  modified_base 21: mod_base = OTHER; note = 2'-O-methyl ribonucleotide
  modified_base 28: mod_base = OTHER; note = 2'-O-methyl ribonucleotide
  modified_base 29: mod_base = OTHER; note = 2'-O-methyl ribonucleotide
  modified_base 30: mod_base = OTHER; note = 2'-O-methyl ribonucleotide
  modified_base 31: mod_base = OTHER; note = 2'-O-methyl ribonucleotide
  modified_base 32: mod_base = OTHER; note = 2'-O-methyl ribonucleotide
  modified_base 34: mod_base = OTHER; note = 2'-O-methyl ribonucleotide
  modified_base 35: mod_base = OTHER; note = 2'-O-methyl ribonucleotide
  modified_base 36: mod_base = OTHER; note = 2'-O-methyl ribonucleotide
  modified_base 37: mod_base = OTHER; note = 2'-O-methyl ribonucleotide
  modified_base 38: mod_base = OTHER; note = 2'-O-methyl ribonucleotide
  modified_base 39: mod_base = OTHER; note = 2'-O-methyl ribonucleotide
  modified_base 40: mod_base = OTHER; note = 2'-O-methyl ribonucleotide
  modified_base 41: mod_base = OTHER; note = 2'-O-methyl ribonucleotide
  modified_base 42: mod_base = OTHER; note = 2'-O-methyl ribonucleotide
  modified_base 46: mod_base = OTHER; note = 2'-O-methyl ribonucleotide
  modified_base 48: mod_base = OTHER; note = 2'-O-methyl ribonucleotide
  modified_base 50: mod_base = OTHER; note = 2'-O-methyl ribonucleotide
  modified_base 52: mod_base = OTHER; note = 2'-O-methyl ribonucleotide
  modified_base 53: mod_base = OTHER; note = 2'-O-methyl ribonucleotide
  modified_base 54: mod_base = OTHER; note = 2'-O-methyl ribonucleotide
  modified_base 55: mod_base = OTHER; note = 2'-O-methyl ribonucleotide
  modified_base 56: mod_base = OTHER; note = 2'-O-methyl ribonucleotide
  modified_base 57: mod_base = OTHER; note = 2'-O-methyl ribonucleotide
  modified_base 60: mod_base = OTHER; note = 2'-O-methyl ribonucleotide
  modified_base 61: mod_base = OTHER; note = 2'-O-methyl ribonucleotide
  modified_base 66: mod_base = OTHER; note = 2'-O-methyl ribonucleotide
  modified_base 67: mod_base = OTHER; note = 2'-O-methyl ribonucleotide
  modified_base 70: mod_base = OTHER; note = 2'-O-methyl ribonucleotide
  modified_base 71: mod_base = OTHER; note = 2'-O-methyl ribonucleotide
  modified_base 72: mod_base = OTHER; note = 2'-O-methyl ribonucleotide
  modified_base 74: mod_base = OTHER; note = 2'-O-methyl ribonucleotide
  modified_base 75: mod_base = OTHER; note = 2'-O-methyl ribonucleotide
  modified_base 76: mod_base = OTHER; note = 2'-O-methyl ribonucleotide
  modified_base 77: mod_base = OTHER; note = 2'-O-methyl ribonucleotide
  modified_base 78: mod_base = OTHER; note = 2'-O-methyl ribonucleotide
  modified_base 79: mod_base = OTHER; note = 2'-O-methyl ribonucleotide
  modified_base 80: mod_base = OTHER; note = 2'-O-methyl ribonucleotide
  modified_base 81: mod_base = OTHER; note = 2'-O-methyl ribonucleotide
  modified_base 83: mod_base = OTHER; note = 2'-O-methyl ribonucleotide
  modified_base 84: mod_base = OTHER; note = 2'-O-methyl ribonucleotide
  modified_base 85: mod_base = OTHER; note = 2'-O-methyl ribonucleotide
  modified_base 86: mod_base = OTHER; note = 2'-O-methyl ribonucleotide
  modified_base 87: mod_base = OTHER; note = 2'-O-methyl ribonucleotide
  modified_base 88: mod_base = OTHER; note = 2'-O-methyl ribonucleotide
  modified_base 89: mod_base = OTHER; note = 2'-O-methyl ribonucleotide
  modified_base 90: mod_base = OTHER; note = 2'-O-methyl ribonucleotide
  modified_base 91: mod_base = OTHER; note = 2'-O-methyl ribonucleotide
  modified_base 92: mod_base = OTHER; note = 2'-O-methyl ribonucleotide
  modified_base 93: mod_base = OTHER; note = 2'-O-methyl ribonucleotide
  modified_base 94: mod_base = OTHER; note = 2'-O-methyl ribonucleotide
  modified_base 95: mod_base = OTHER; note = 2'-O-methyl ribonucleotide
  modified_base 96: mod_base = OTHER; note = 2'-O-methyl ribonucleotide
  modified_base 97: mod_base = OTHER; note = 2'-O-methyl ribonucleotide
  modified_base 98: mod_base = OTHER; note = 2'-O-methyl ribonucleotide
  modified_base 99: mod_base = OTHER; note = 2'-O-methyl ribonucleotide
  modified_base 100: mod_base = OTHER; note = 2'-O-methyl ribonucleotide
  modified_base 101: mod_base = OTHER; note = uniform ribonucleotides (A, C, G, inosine or U), deoxynucleotides (A, G, C, inosine or T), ribonebularine, 2'-O-methylnebularine or deoxynebularine
  modified_base 102: mod_base = OTHER; note = uniform ribonucleotides (A, C, G, inosine or U), deoxynucleotides (A, G, C, inosine or T), ribonebularine, 2'-O-methylnebularine or deoxynebularine
  modified_base 103: mod_base = OTHER; note = uniform ribonucleotides (A, C, G, inosine or U), deoxynucleotides (A, G, C, inosine or T), ribonebularine, 2'-O-methylnebularine or deoxynebularine
  modified_base 1..3: mod_base = OTHER; note = phosphorothioate linkage
  modified_base 98..100: mod_base = OTHER; note = phosphorothioate linkage
  misc_feature 1..100: note = RNA
  misc_feature 101..103: note = Optionally DNA or RNA

SEQ ID NO: 3072 - DNA, 103 bp, synthetic construct; identical to SEQ ID NO: 1796
  source 1..103: mol_type = other DNA
  modified_base 1: mod_base = OTHER; note = 2'-O-methyl ribonucleotide
  modified_base 2: mod_base = OTHER; note = 2'-O-methyl ribonucleotide
  modified_base 3: mod_base = OTHER; note = 2'-O-methyl ribonucleotide
  modified_base 21: mod_base = OTHER; note = 2'-O-methyl ribonucleotide
  modified_base 28: mod_base = OTHER; note = 2'-O-methyl ribonucleotide
  modified_base 29: mod_base = OTHER; note = 2'-O-methyl ribonucleotide
  modified_base 30: mod_base = OTHER; note = 2'-O-methyl ribonucleotide
  modified_base 31: mod_base = OTHER; note = 2'-O-methyl ribonucleotide
  modified_base 32: mod_base = OTHER; note = 2'-O-methyl ribonucleotide
  modified_base 33: mod_base = OTHER; note = 2'-O-methyl ribonucleotide
  modified_base 34: mod_base = OTHER; note = 2'-O-methyl ribonucleotide
  modified_base 35: mod_base = OTHER; note = 2'-O-methyl ribonucleotide
  modified_base 36: mod_base = OTHER; note = 2'-O-methyl ribonucleotide
  modified_base 37: mod_base = OTHER; note = 2'-O-methyl ribonucleotide
  modified_base 38: mod_base = OTHER; note = 2'-O-methyl ribonucleotide
  modified_base 39: mod_base = OTHER; note = 2'-O-methyl ribonucleotide
  modified_base 40: mod_base = OTHER; note = 2'-O-methyl ribonucleotide
  modified_base 41: mod_base = OTHER; note = 2'-O-methyl ribonucleotide
  modified_base 42: mod_base = OTHER; note = 2'-O-methyl ribonucleotide
  modified_base 46: mod_base = OTHER; note = 2'-O-methyl ribonucleotide
  modified_base 48: mod_base = OTHER; note = 2'-O-methyl ribonucleotide
  modified_base 50: mod_base = OTHER; note = 2'-O-methyl ribonucleotide
  modified_base 52: mod_base = OTHER; note = 2'-O-methyl ribonucleotide
  modified_base 53: mod_base = OTHER; note = 2'-O-methyl ribonucleotide
  modified_base 54: mod_base = OTHER; note = 2'-O-methyl ribonucleotide
  modified_base 55: mod_base = OTHER; note = 2'-O-methyl ribonucleotide
  modified_base 56: mod_base = OTHER; note = 2'-O-methyl ribonucleotide
  modified_base 57: mod_base = OTHER; note = 2'-O-methyl ribonucleotide
  modified_base 60: mod_base = OTHER; note = 2'-O-methyl ribonucleotide
  modified_base 61: mod_base = OTHER; note = 2'-O-methyl ribonucleotide
  modified_base 66: mod_base = OTHER; note = 2'-O-methyl ribonucleotide
  modified_base 67: mod_base = OTHER; note = 2'-O-methyl ribonucleotide
  modified_base 70: mod_base = OTHER; note = 2'-O-methyl ribonucleotide
  modified_base 71: mod_base = OTHER; note = 2'-O-methyl ribonucleotide
  modified_base 72: mod_base = OTHER; note = 2'-O-methyl ribonucleotide
  modified_base 73: mod_base = OTHER; note = 2'-O-methyl ribonucleotide
  modified_base 74: mod_base = OTHER; note = 2'-O-methyl ribonucleotide
  modified_base 75: mod_base = OTHER; note = 2'-O-methyl ribonucleotide
  modified_base 76: mod_base = OTHER; note = 2'-O-methyl ribonucleotide
  modified_base 77: mod_base = OTHER; note = 2'-O-methyl ribonucleotide
  modified_base 78: mod_base = OTHER; note = 2'-O-methyl ribonucleotide
  modified_base 79: mod_base = OTHER; note = 2'-O-methyl ribonucleotide
  modified_base 80: mod_base = OTHER; note = 2'-O-methyl ribonucleotide
  modified_base 81: mod_base = OTHER; note = 2'-O-methyl ribonucleotide
  modified_base 83: mod_base = OTHER; note = 2'-O-methyl ribonucleotide
  modified_base 84: mod_base = OTHER; note = 2'-O-methyl ribonucleotide
  modified_base 85: mod_base = OTHER; note = 2'-O-methyl ribonucleotide
  modified_base 86: mod_base = OTHER; note = 2'-O-methyl ribonucleotide
  modified_base 87: mod_base = OTHER; note = 2'-O-methyl ribonucleotide
  modified_base 88: mod_base = OTHER; note = 2'-O-methyl ribonucleotide
  modified_base 89: mod_base = OTHER; note = 2'-O-methyl ribonucleotide
  modified_base 90: mod_base = OTHER; note = 2'-O-methyl ribonucleotide
  modified_base 91: mod_base = OTHER; note = 2'-O-methyl ribonucleotide
  modified_base 92: mod_base = OTHER; note = 2'-O-methyl ribonucleotide
  modified_base 93: mod_base = OTHER; note = 2'-O-methyl ribonucleotide
  modified_base 94: mod_base = OTHER; note = 2'-O-methyl ribonucleotide
  modified_base 95: mod_base = OTHER; note = 2'-O-methyl ribonucleotide
  modified_base 96: mod_base = OTHER; note = 2'-O-methyl ribonucleotide
  modified_base 97: mod_base = OTHER; note = 2'-O-methyl ribonucleotide
  modified_base 98: mod_base = OTHER; note = 2'-O-methyl ribonucleotide
  modified_base 99: mod_base = OTHER; note = 2'-O-methyl ribonucleotide
  modified_base 100: mod_base = OTHER; note = 2'-O-methyl ribonucleotide
  modified_base 101: mod_base = OTHER; note = uniform ribonucleotides (A, C, G, inosine or U), deoxynucleotides (A, G, C, inosine or T), ribonebularine, 2'-O-methylnebularine or deoxynebularine
  modified_base 102: mod_base = OTHER; note = uniform ribonucleotides (A, C, G, inosine or U), deoxynucleotides (A, G, C, inosine or T), ribonebularine, 2'-O-methylnebularine or deoxynebularine
  modified_base 103: mod_base = OTHER; note = uniform ribonucleotides (A, C, G, inosine or U), deoxynucleotides (A, G, C, inosine or T), ribonebularine, 2'-O-methylnebularine or deoxynebularine
  modified_base 1..3: mod_base = OTHER; note = phosphorothioate linkage
  modified_base 98..100: mod_base = OTHER; note = phosphorothioate linkage
  misc_feature 1..100: note = RNA
  misc_feature 101..103: note = Optionally DNA or RNA

SEQ ID NO: 3073 - DNA, 103 bp, synthetic construct; identical to SEQ ID NO: 1796
  source 1..103: mol_type = other DNA
  modified_base 1: mod_base = OTHER; note = 2'-O-methyl ribonucleotide
  modified_base 2: mod_base = OTHER; note = 2'-O-methyl ribonucleotide
  modified_base 3: mod_base = OTHER; note = 2'-O-methyl ribonucleotide
  modified_base 21: mod_base = OTHER; note = 2'-O-methyl ribonucleotide
  modified_base 28: mod_base = OTHER; note = 2'-O-methyl ribonucleotide
  modified_base 29: mod_base = OTHER; note = 2'-O-methyl ribonucleotide
  modified_base 30: mod_base = OTHER; note = 2'-O-methyl ribonucleotide
  modified_base 31: mod_base = OTHER; note = 2'-O-methyl ribonucleotide
  modified_base 32: mod_base = OTHER; note = 2'-O-methyl ribonucleotide
  modified_base 34: mod_base = OTHER; note = 2'-O-methyl ribonucleotide
  modified_base 35: mod_base = OTHER; note = 2'-O-methyl ribonucleotide
  modified_base 36: mod_base = OTHER; note = 2'-O-methyl ribonucleotide
  modified_base 37: mod_base = OTHER; note = 2'-O-methyl ribonucleotide
  modified_base 38: mod_base = OTHER; note = 2'-O-methyl ribonucleotide
  modified_base 39: mod_base = OTHER; note = 2'-O-methyl ribonucleotide
  modified_base 40: mod_base = OTHER; note = 2'-O-methyl ribonucleotide
  modified_base 41: mod_base = OTHER; note = 2'-O-methyl ribonucleotide
  modified_base 42: mod_base = OTHER; note = 2'-O-methyl ribonucleotide
  modified_base 46: mod_base = OTHER; note = 2'-O-methyl ribonucleotide
  modified_base 48: mod_base = OTHER; note = 2'-O-methyl ribonucleotide
  modified_base 50: mod_base = OTHER; note = 2'-O-methyl ribonucleotide
  modified_base 52: mod_base = OTHER; note = 2'-O-methyl ribonucleotide
  modified_base 53: mod_base = OTHER; note = 2'-O-methyl ribonucleotide
  modified_base 54: mod_base = OTHER; note = 2'-O-methyl ribonucleotide
  modified_base 55: mod_base = OTHER; note = 2'-O-methyl ribonucleotide
  modified_base 56: mod_base = OTHER; note = 2'-O-methyl ribonucleotide
  modified_base 57: mod_base = OTHER; note = 2'-O-methyl ribonucleotide
  modified_base 60: mod_base = OTHER; note = 2'-O-methyl ribonucleotide
  modified_base 61: mod_base = OTHER; note = 2'-O-methyl ribonucleotide
  modified_base 66: mod_base = OTHER; note = 2'-O-methyl ribonucleotide
  modified_base 67: mod_base = OTHER; note = 2'-O-methyl ribonucleotide
  modified_base 70: mod_base = OTHER; note = 2'-O-methyl ribonucleotide
  modified_base 71: mod_base = OTHER; note = 2'-O-methyl ribonucleotide
  modified_base 72: mod_base = OTHER; note = 2'-O-methyl ribonucleotide
  modified_base 74: mod_base = OTHER; note = 2'-O-methyl ribonucleotide
  modified_base 75: mod_base = OTHER; note = 2'-O-methyl ribonucleotide
  modified_base 76: mod_base = OTHER; note = 2'-O-methyl ribonucleotide
  modified_base 77: mod_base = OTHER; note = 2'-O-methyl ribonucleotide
  modified_base 78: mod_base = OTHER; note = 2'-O-methyl ribonucleotide
  modified_base 79: mod_base = OTHER; note = 2'-O-methyl ribonucleotide
  modified_base 80: mod_base = OTHER; note = 2'-O-methyl ribonucleotide
  modified_base 81: mod_base = OTHER; note = 2'-O-methyl ribonucleotide
  modified_base 83: mod_base = OTHER; note = 2'-O-methyl ribonucleotide
  modified_base 84: mod_base = OTHER; note = 2'-O-methyl ribonucleotide
  modified_base 85: mod_base = OTHER; note = 2'-O-methyl ribonucleotide
  modified_base 86: mod_base = OTHER; note = 2'-O-methyl ribonucleotide
  modified_base 87: mod_base = OTHER; note = 2'-O-methyl ribonucleotide
  modified_base 88: mod_base = OTHER; note = 2'-O-methyl ribonucleotide
  modified_base 89: mod_base = OTHER; note = 2'-O-methyl ribonucleotide
  modified_base 90: mod_base = OTHER; note = 2'-O-methyl ribonucleotide
  modified_base 91: mod_base = OTHER; note = 2'-O-methyl ribonucleotide
  modified_base 92: mod_base = OTHER; note = 2'-O-methyl ribonucleotide
  modified_base 93: mod_base = OTHER; note = 2'-O-methyl ribonucleotide
  modified_base 94: mod_base = OTHER; note = 2'-O-methyl ribonucleotide
  modified_base 95: mod_base = OTHER; note = 2'-O-methyl ribonucleotide
  modified_base 96: mod_base = OTHER; note = 2'-O-methyl ribonucleotide
  modified_base 97: mod_base = OTHER; note = 2'-O-methyl ribonucleotide
  modified_base 98: mod_base = OTHER; note = 2'-O-methyl ribonucleotide
  modified_base 99: mod_base = OTHER; note = 2'-O-methyl ribonucleotide
  modified_base 100: mod_base = OTHER; note = 2'-O-methyl ribonucleotide
  modified_base 101: mod_base = OTHER; note = uniform ribonucleotides (A, C, G, inosine or U), deoxynucleotides (A, G, C, inosine or T), ribonebularine, 2'-O-methylnebularine or deoxynebularine
  modified_base 102: mod_base = OTHER; note = uniform ribonucleotides (A, C, G, inosine or U), deoxynucleotides (A, G, C, inosine or T), ribonebularine, 2'-O-methylnebularine or deoxynebularine
  modified_base 103: mod_base = OTHER; note = uniform ribonucleotides (A, C, G, inosine or U), deoxynucleotides (A, G, C, inosine or T), ribonebularine, 2'-O-methylnebularine or deoxynebularine
  modified_base 1..3: mod_base = OTHER; note = phosphorothioate linkage
  modified_base 98..100: mod_base = OTHER; note = phosphorothioate linkage
  misc_feature 1..100: note = RNA
  misc_feature 101..103: note = Optionally DNA or RNA

SEQ ID NO: 3074 - DNA, 103 bp, synthetic construct; identical to SEQ ID NO: 1795
  source 1..103: mol_type = other DNA
  modified_base 1: mod_base = OTHER; note = 2'-O-methyl ribonucleotide
  modified_base 2: mod_base = OTHER; note = 2'-O-methyl ribonucleotide
  modified_base 3: mod_base = OTHER; note = 2'-O-methyl ribonucleotide
  modified_base 21: mod_base = OTHER; note = 2'-O-methyl ribonucleotide
  modified_base 28: mod_base = OTHER; note = 2'-O-methyl ribonucleotide
  modified_base 29: mod_base = OTHER; note = 2'-O-methyl ribonucleotide
  modified_base 30: mod_base = OTHER; note = 2'-O-methyl ribonucleotide
  modified_base 31: mod_base = OTHER; note = 2'-O-methyl ribonucleotide
  modified_base 32: mod_base = OTHER; note = 2'-O-methyl ribonucleotide
  modified_base 33: mod_base = OTHER; note = 2'-O-methyl ribonucleotide
  modified_base 34: mod_base = OTHER; note = 2'-O-methyl ribonucleotide
  modified_base 35: mod_base = OTHER; note = 2'-O-methyl ribonucleotide
  modified_base 36: mod_base = OTHER; note = 2'-O-methyl ribonucleotide
  modified_base 37: mod_base = OTHER; note = 2'-O-methyl ribonucleotide
  modified_base 38: mod_base = OTHER; note = 2'-O-methyl ribonucleotide
  modified_base 39: mod_base = OTHER; note = 2'-O-methyl ribonucleotide
  modified_base 40: mod_base = OTHER; note = 2'-O-methyl ribonucleotide
  modified_base 41: mod_base = OTHER; note = 2'-O-methyl ribonucleotide
  modified_base 42: mod_base = OTHER; note = 2'-O-methyl ribonucleotide
  modified_base 46: mod_base = OTHER; note = 2'-O-methyl ribonucleotide
  modified_base 48: mod_base = OTHER; note = 2'-O-methyl ribonucleotide
  modified_base 50: mod_base = OTHER; note = 2'-O-methyl ribonucleotide
  modified_base 52: mod_base = OTHER; note = 2'-O-methyl ribonucleotide
  modified_base 53: mod_base = OTHER; note = 2'-O-methyl ribonucleotide
  modified_base 54: mod_base = OTHER; note = 2'-O-methyl ribonucleotide
  modified_base 55: mod_base = OTHER; note = 2'-O-methyl ribonucleotide
  modified_base 56: mod_base = OTHER; note = 2'-O-methyl ribonucleotide
  modified_base 57: mod_base = OTHER; note = 2'-O-methyl ribonucleotide
  modified_base 60: mod_base = OTHER; note = 2'-O-methyl ribonucleotide
  modified_base 61: mod_base = OTHER; note = 2'-O-methyl ribonucleotide
  modified_base 66: mod_base = OTHER; note = 2'-O-methyl ribonucleotide
  modified_base 67: mod_base = OTHER; note = 2'-O-methyl ribonucleotide
  modified_base 70: mod_base = OTHER; note = 2'-O-methyl ribonucleotide
  modified_base 71: mod_base = OTHER; note = 2'-O-methyl ribonucleotide
  modified_base 72: mod_base = OTHER; note = 2'-O-methyl ribonucleotide
  modified_base 73: mod_base = OTHER; note = 2'-O-methyl ribonucleotide
  modified_base 74: mod_base = OTHER; note = 2'-O-methyl ribonucleotide
  modified_base 75: mod_base = OTHER; note = 2'-O-methyl ribonucleotide
  modified_base 76: mod_base = OTHER; note = 2'-O-methyl ribonucleotide
  modified_base 77: mod_base = OTHER; note = 2'-O-methyl ribonucleotide
  modified_base 78: mod_base = OTHER; note = 2'-O-methyl ribonucleotide
  modified_base 79: mod_base = OTHER; note = 2'-O-methyl ribonucleotide
  modified_base 80: mod_base = OTHER; note = 2'-O-methyl ribonucleotide
  modified_base 81: mod_base = OTHER; note = 2'-O-methyl ribonucleotide
  modified_base 83: mod_base = OTHER; note = 2'-O-methyl ribonucleotide
  modified_base 84: mod_base = OTHER; note = 2'-O-methyl ribonucleotide
  modified_base 85: mod_base = OTHER; note = 2'-O-methyl ribonucleotide
  modified_base 86: mod_base = OTHER; note = 2'-O-methyl ribonucleotide
  modified_base 87: mod_base = OTHER; note = 2'-O-methyl ribonucleotide
  modified_base 88: mod_base = OTHER; note = 2'-O-methyl ribonucleotide
  modified_base 89: mod_base = OTHER; note = 2'-O-methyl ribonucleotide
  modified_base 90: mod_base = OTHER; note = 2'-O-methyl ribonucleotide
  modified_base 91: mod_base = OTHER; note = 2'-O-methyl ribonucleotide
  modified_base 92: mod_base = OTHER; note = 2'-O-methyl ribonucleotide
  modified_base 93: mod_base = OTHER; note = 2'-O-methyl ribonucleotide
  modified_base 94: mod_base = OTHER; note = 2'-O-methyl ribonucleotide
  modified_base 95: mod_base = OTHER; note = 2'-O-methyl ribonucleotide
  modified_base 96: mod_base = OTHER; note = 2'-O-methyl ribonucleotide
  modified_base 97: mod_base = OTHER; note = 2'-O-methyl ribonucleotide
  modified_base 98: mod_base = OTHER; note = 2'-O-methyl ribonucleotide
  modified_base 99: mod_base = OTHER; note = 2'-O-methyl ribonucleotide
  modified_base 100: mod_base = OTHER; note = 2'-O-methyl ribonucleotide
  modified_base 101: mod_base = OTHER; note = uniform ribonucleotides (A, C, G, inosine or U), deoxynucleotides (A, G, C, inosine or T), ribonebularine, 2'-O-methylnebularine or deoxynebularine
  modified_base 102: mod_base = OTHER; note = uniform ribonucleotides (A, C, G, inosine or U), deoxynucleotides (A, G, C, inosine or T), ribonebularine, 2'-O-methylnebularine or deoxynebularine
  modified_base 103: mod_base = OTHER; note = uniform ribonucleotides (A, C, G, inosine or U), deoxynucleotides (A, G, C, inosine or T), ribonebularine, 2'-O-methylnebularine or deoxynebularine
  modified_base 1..3: mod_base = OTHER; note = phosphorothioate linkage
  modified_base 64..65: mod_base = OTHER; note = phosphorothioate linkage
  modified_base 98..100: mod_base = OTHER; note = phosphorothioate linkage
  misc_feature 1..100: note = RNA
  misc_feature 101..103: note = Optionally DNA or RNA

SEQ ID NO: 3075 - DNA, 103 bp, synthetic construct; identical to SEQ ID NO: 1795
  source 1..103: mol_type = other DNA
  modified_base 1: mod_base = OTHER; note = 2'-O-methyl ribonucleotide
  modified_base 2: mod_base = OTHER; note = 2'-O-methyl ribonucleotide
  modified_base 3: mod_base = OTHER; note = 2'-O-methyl ribonucleotide
  modified_base 21: mod_base = OTHER; note = 2'-O-methyl ribonucleotide
  modified_base 28: mod_base = OTHER; note = 2'-O-methyl ribonucleotide
  modified_base 29: mod_base = OTHER; note = 2'-O-methyl ribonucleotide
  modified_base 30: mod_base = OTHER; note = 2'-O-methyl ribonucleotide
  modified_base 31: mod_base = OTHER; note = 2'-O-methyl ribonucleotide
  modified_base 32: mod_base = OTHER; note = 2'-O-methyl ribonucleotide
  modified_base 34: mod_base = OTHER; note = 2'-O-methyl ribonucleotide
  modified_base 35: mod_base = OTHER; note = 2'-O-methyl ribonucleotide
  modified_base 36: mod_base = OTHER; note = 2'-O-methyl ribonucleotide
  modified_base 37: mod_base = OTHER; note = 2'-O-methyl ribonucleotide
  modified_base 38: mod_base = OTHER; note = 2'-O-methyl ribonucleotide
  modified_base 39: mod_base = OTHER; note = 2'-O-methyl ribonucleotide
  modified_base 40: mod_base = OTHER; note = 2'-O-methyl ribonucleotide
  modified_base 41: mod_base = OTHER; note = 2'-O-methyl ribonucleotide
  modified_base 42: mod_base = OTHER; note = 2'-O-methyl ribonucleotide
  modified_base 46: mod_base = OTHER; note = 2'-O-methyl ribonucleotide
  modified_base 48: mod_base = OTHER; note = 2'-O-methyl ribonucleotide
  modified_base 50: mod_base = OTHER; note = 2'-O-methyl ribonucleotide
  modified_base 52: mod_base = OTHER; note = 2'-O-methyl ribonucleotide
  modified_base 53: mod_base = OTHER; note = 2'-O-methyl ribonucleotide
  modified_base 54: mod_base = OTHER; note = 2'-O-methyl ribonucleotide
  modified_base 55: mod_base = OTHER; note = 2'-O-methyl ribonucleotide
  modified_base 56: mod_base = OTHER; note = 2'-O-methyl ribonucleotide
  modified_base 57: mod_base = OTHER; note = 2'-O-methyl ribonucleotide
  modified_base 60: mod_base = OTHER; note = 2'-O-methyl ribonucleotide
  modified_base 61: mod_base = OTHER; note = 2'-O-methyl ribonucleotide
  modified_base 66: mod_base = OTHER; note = 2'-O-methyl ribonucleotide
  modified_base 67: mod_base = OTHER; note = 2'-O-methyl ribonucleotide
  modified_base 70: mod_base = OTHER; note = 2'-O-methyl ribonucleotide
  modified_base 71: mod_base = OTHER; note = 2'-O-methyl ribonucleotide
  modified_base 72: mod_base = OTHER; note = 2'-O-methyl ribonucleotide
  modified_base 74: mod_base = OTHER; note = 2'-O-methyl ribonucleotide
  modified_base 75: mod_base = OTHER; note = 2'-O-methyl ribonucleotide
  modified_base 76: mod_base = OTHER; note = 2'-O-methyl ribonucleotide
  modified_base 77: mod_base = OTHER; note = 2'-O-methyl ribonucleotide
  modified_base 78: mod_base = OTHER; note = 2'-O-methyl ribonucleotide
  modified_base 79: mod_base = OTHER; note = 2'-O-methyl ribonucleotide
  modified_base 80: mod_base = OTHER; note = 2'-O-methyl ribonucleotide
  modified_base 81: mod_base = OTHER; note = 2'-O-methyl ribonucleotide
  modified_base 83: mod_base = OTHER; note = 2'-O-methyl ribonucleotide
  modified_base 84: mod_base = OTHER; note = 2'-O-methyl ribonucleotide
  modified_base 85: mod_base = OTHER; note = 2'-O-methyl ribonucleotide
  modified_base 86: mod_base = OTHER; note = 2'-O-methyl ribonucleotide
  modified_base 87: mod_base = OTHER; note = 2'-O-methyl ribonucleotide
  modified_base 88: mod_base = OTHER; note = 2'-O-methyl ribonucleotide
  modified_base 89: mod_base = OTHER; note = 2'-O-methyl ribonucleotide
  modified_base 90: mod_base = OTHER; note = 2'-O-methyl ribonucleotide
  modified_base 91: mod_base = OTHER; note = 2'-O-methyl ribonucleotide
  modified_base 92: mod_base = OTHER; note = 2'-O-methyl ribonucleotide
  modified_base 93: mod_base = OTHER; note = 2'-O-methyl ribonucleotide
  modified_base 94: mod_base = OTHER; note = 2'-O-methyl ribonucleotide
  modified_base 95: mod_base = OTHER; note = 2'-O-methyl ribonucleotide
  modified_base 96: mod_base = OTHER; note = 2'-O-methyl ribonucleotide
  modified_base 97: mod_base = OTHER; note = 2'-O-methyl ribonucleotide
  modified_base 98: mod_base = OTHER; note = 2'-O-methyl ribonucleotide
  modified_base 99: mod_base = OTHER; note = 2'-O-methyl ribonucleotide
  modified_base 100: mod_base = OTHER; note = 2'-O-methyl ribonucleotide
  modified_base 101: mod_base = OTHER; note = uniform ribonucleotides (A, C, G, inosine or U), deoxynucleotides (A, G, C, inosine or T), ribonebularine, 2'-O-methylnebularine or deoxynebularine
  modified_base 102: mod_base = OTHER; note = uniform ribonucleotides (A, C, G, inosine or U), deoxynucleotides (A, G, C, inosine or T), ribonebularine, 2'-O-methylnebularine or deoxynebularine
  modified_base 103: mod_base = OTHER; note = uniform ribonucleotides (A, C, G, inosine or U), deoxynucleotides (A, G, C, inosine or T), ribonebularine, 2'-O-methylnebularine or deoxynebularine
  modified_base 1..3: mod_base = OTHER; note = phosphorothioate linkage
  modified_base 64..65: mod_base = OTHER; note = phosphorothioate linkage
  modified_base 98..100: mod_base = OTHER; note = phosphorothioate linkage
  misc_feature 1..100: note = RNA
  misc_feature 101..103: note = Optionally DNA or RNA

SEQ ID NO: 3076 - DNA, 103 bp, synthetic construct; identical to SEQ ID NO: 1796
  source 1..103: mol_type = other DNA
  modified_base 1: mod_base = OTHER; note = 2'-O-methyl ribonucleotide
  modified_base 2: mod_base = OTHER; note = 2'-O-methyl ribonucleotide
  modified_base 3: mod_base = OTHER; note = 2'-O-methyl ribonucleotide
  modified_base 21: mod_base = OTHER; note = 2'-O-methyl ribonucleotide
  modified_base 28: mod_base = OTHER; note = 2'-O-methyl ribonucleotide
  modified_base 29: mod_base = OTHER; note = 2'-O-methyl ribonucleotide
  modified_base 30: mod_base = OTHER; note = 2'-O-methyl ribonucleotide
  modified_base 31: mod_base = OTHER; note = 2'-O-methyl ribonucleotide
  modified_base 32: mod_base = OTHER; note = 2'-O-methyl ribonucleotide
  modified_base 33: mod_base = OTHER; note = 2'-O-methyl ribonucleotide
  modified_base 34: mod_base = OTHER; note = 2'-O-methyl ribonucleotide
  modified_base 35: mod_base = OTHER; note = 2'-O-methyl ribonucleotide
  modified_base 36: mod_base = OTHER; note = 2'-O-methyl ribonucleotide
  modified_base 37: mod_base = OTHER; note = 2'-O-methyl ribonucleotide
  modified_base 38: mod_base = OTHER; note = 2'-O-methyl ribonucleotide
  modified_base 39: mod_base = OTHER; note = 2'-O-methyl ribonucleotide
  modified_base 40: mod_base = OTHER; note = 2'-O-methyl ribonucleotide
  modified_base 41: mod_base = OTHER; note = 2'-O-methyl ribonucleotide
  modified_base 42: mod_base = OTHER; note = 2'-O-methyl ribonucleotide
  modified_base 46: mod_base = OTHER; note = 2'-O-methyl ribonucleotide
  modified_base 48: mod_base = OTHER; note = 2'-O-methyl ribonucleotide
  modified_base 50: mod_base = OTHER; note = 2'-O-methyl ribonucleotide
  modified_base 52: mod_base = OTHER; note = 2'-O-methyl ribonucleotide
  modified_base 53: mod_base = OTHER; note = 2'-O-methyl ribonucleotide
  modified_base 54: mod_base = OTHER; note = 2'-O-methyl ribonucleotide
  modified_base 55: mod_base = OTHER; note = 2'-O-methyl ribonucleotide
  modified_base 56: mod_base = OTHER; note = 2'-O-methyl ribonucleotide
  modified_base 57: mod_base = OTHER; note = 2'-O-methyl ribonucleotide
  modified_base 60: mod_base = OTHER; note = 2'-O-methyl ribonucleotide
  modified_base 61: mod_base = OTHER; note = 2'-O-methyl ribonucleotide
  modified_base 66: mod_base = OTHER; note = 2'-O-methyl ribonucleotide
  modified_base 67: mod_base = OTHER; note = 2'-O-methyl ribonucleotide
  modified_base 70: mod_base = OTHER; note = 2'-O-methyl ribonucleotide
  modified_base 71: mod_base = OTHER; note = 2'-O-methyl ribonucleotide
  modified_base 72: mod_base = OTHER; note = 2'-O-methyl ribonucleotide
  modified_base 73: mod_base = OTHER; note = 2'-O-methyl ribonucleotide
  modified_base 74: mod_base = OTHER; note = 2'-O-methyl ribonucleotide
  modified_base 75: mod_base = OTHER; note = 2'-O-methyl ribonucleotide
  modified_base 76: mod_base = OTHER; note = 2'-O-methyl ribonucleotide
  modified_base 77: mod_base = OTHER; note = 2'-O-methyl ribonucleotide
  modified_base 78: mod_base = OTHER; note = 2'-O-methyl ribonucleotide
  modified_base 79: mod_base = OTHER; note = 2'-O-methyl ribonucleotide
  modified_base 80: mod_base = OTHER; note = 2'-O-methyl ribonucleotide
  modified_base 81: mod_base = OTHER; note = 2'-O-methyl ribonucleotide
  modified_base 83: mod_base = OTHER; note = 2'-O-methyl ribonucleotide
  modified_base 84: mod_base = OTHER; note = 2'-O-methyl ribonucleotide
  modified_base 85: mod_base = OTHER; note = 2'-O-methyl ribonucleotide
  modified_base 86: mod_base = OTHER; note = 2'-O-methyl ribonucleotide
  modified_base 87: mod_base = OTHER; note = 2'-O-methyl ribonucleotide
  modified_base 88: mod_base = OTHER; note = 2'-O-methyl ribonucleotide
  modified_base 89: mod_base = OTHER; note = 2'-O-methyl ribonucleotide
  modified_base 90: mod_base = OTHER; note = 2'-O-methyl ribonucleotide
  modified_base 91: mod_base = OTHER; note = 2'-O-methyl ribonucleotide
  modified_base 92: mod_base = OTHER; note = 2'-O-methyl ribonucleotide
  modified_base 93: mod_base = OTHER; note = 2'-O-methyl ribonucleotide
  modified_base 94: mod_base = OTHER; note = 2'-O-methyl ribonucleotide
  modified_base 95: mod_base = OTHER; note = 2'-O-methyl ribonucleotide
  modified_base 96: mod_base = OTHER; note = 2'-O-methyl ribonucleotide
  modified_base 97: mod_base = OTHER; note = 2'-O-methyl ribonucleotide
  modified_base 98: mod_base = OTHER; note = 2'-O-methyl ribonucleotide
  modified_base 99: mod_base = OTHER; note = 2'-O-methyl ribonucleotide
  modified_base 100: mod_base = OTHER; note = 2'-O-methyl ribonucleotide
  modified_base 101: mod_base = OTHER; note = uniform ribonucleotides (A, C, G, inosine or U), deoxynucleotides (A, G, C, inosine or T), ribonebularine, 2'-O-methylnebularine or deoxynebularine
  modified_base 102: mod_base = OTHER; note = uniform ribonucleotides (A, C, G, inosine or U), deoxynucleotides (A, G, C, inosine or T), ribonebularine, 2'-O-methylnebularine or deoxynebularine
  modified_base 103: mod_base = OTHER; note = uniform ribonucleotides (A, C, G, inosine or U), deoxynucleotides (A, G, C, inosine or T), ribonebularine, 2'-O-methylnebularine or deoxynebularine
  modified_base 1..3: mod_base = OTHER; note = phosphorothioate linkage
  modified_base 64..65: mod_base = OTHER; note = phosphorothioate linkage
  modified_base 98..100: mod_base = OTHER; note = phosphorothioate linkage
  misc_feature 1..100: note = RNA
  misc_feature 101..103: note = Optionally DNA or RNA

SEQ ID NO: 3077 - DNA, 103 bp, synthetic construct; identical to SEQ ID NO: 1796
  source 1..103: mol_type = other DNA
  modified_base 1: mod_base = OTHER; note = 2'-O-methyl ribonucleotide
  modified_base 2: mod_base = OTHER; note = 2'-O-methyl ribonucleotide
  modified_base 3: mod_base = OTHER; note = 2'-O-methyl ribonucleotide
  modified_base 21: mod_base = OTHER; note = 2'-O-methyl ribonucleotide
  modified_base 28: mod_base = OTHER; note = 2'-O-methyl ribonucleotide
  modified_base 29: mod_base = OTHER; note = 2'-O-methyl ribonucleotide
  modified_base 30: mod_base = OTHER; note = 2'-O-methyl ribonucleotide
  modified_base 31: mod_base = OTHER; note = 2'-O-methyl ribonucleotide
  modified_base 32: mod_base = OTHER; note = 2'-O-methyl ribonucleotide
  modified_base 34: mod_base = OTHER; note = 2'-O-methyl ribonucleotide
  modified_base 35: mod_base = OTHER; note = 2'-O-methyl ribonucleotide
  modified_base 36: mod_base = OTHER; note = 2'-O-methyl ribonucleotide
  modified_base 37: mod_base = OTHER; note = 2'-O-methyl ribonucleotide
  modified_base 38: mod_base = OTHER; note = 2'-O-methyl ribonucleotide
  modified_base 39: mod_base = OTHER; note = 2'-O-methyl ribonucleotide
  modified_base 40: mod_base = OTHER; note = 2'-O-methyl ribonucleotide
  modified_base 41: mod_base = OTHER; note = 2'-O-methyl ribonucleotide
  modified_base 42: mod_base = OTHER; note = 2'-O-methyl ribonucleotide
  modified_base 46: mod_base = OTHER; note = 2'-O-methyl ribonucleotide
  modified_base 48: mod_base = OTHER; note = 2'-O-methyl ribonucleotide
  modified_base 50: mod_base = OTHER; note = 2'-O-methyl ribonucleotide
  modified_base 52: mod_base = OTHER; note = 2'-O-methyl ribonucleotide
  modified_base 53: mod_base = OTHER; note = 2'-O-methyl ribonucleotide
  modified_base 54: mod_base = OTHER; note = 2'-O-methyl ribonucleotide
  modified_base 55: mod_base = OTHER; note = 2'-O-methyl ribonucleotide
  modified_base 56: mod_base = OTHER; note = 2'-O-methyl ribonucleotide
  modified_base 57: mod_base = OTHER; note = 2'-O-methyl ribonucleotide
  modified_base 60: mod_base = OTHER; note = 2'-O-methyl ribonucleotide
  modified_base 61: mod_base = OTHER; note = 2'-O-methyl ribonucleotide
  modified_base 66: mod_base = OTHER; note = 2'-O-methyl ribonucleotide
  modified_base 67: mod_base = OTHER; note = 2'-O-methyl ribonucleotide
  modified_base 70: mod_base = OTHER; note = 2'-O-methyl ribonucleotide
  modified_base 71: mod_base = OTHER; note = 2'-O-methyl ribonucleotide
  modified_base 72: mod_base = OTHER; note = 2'-O-methyl ribonucleotide
  modified_base 74: mod_base = OTHER; note = 2'-O-methyl ribonucleotide
  modified_base 75: mod_base = OTHER; note = 2'-O-methyl ribonucleotide
  modified_base 76: mod_base = OTHER; note = 2'-O-methyl ribonucleotide
  modified_base 77: mod_base = OTHER; note = 2'-O-methyl ribonucleotide
  modified_base 78: mod_base = OTHER; note = 2'-O-methyl ribonucleotide
  modified_base 79: mod_base = OTHER; note = 2'-O-methyl ribonucleotide
  modified_base 80: mod_base = OTHER; note = 2'-O-methyl ribonucleotide
  modified_base 81: mod_base = OTHER; note = 2'-O-methyl ribonucleotide
  modified_base 83: mod_base = OTHER; note = 2'-O-methyl ribonucleotide
  modified_base 84: mod_base = OTHER; note = 2'-O-methyl ribonucleotide
  modified_base 85: mod_base = OTHER; note = 2'-O-methyl ribonucleotide
  modified_base 86: mod_base = OTHER; note = 2'-O-methyl ribonucleotide
  modified_base 87: mod_base = OTHER; note = 2'-O-methyl ribonucleotide
  modified_base 88: mod_base = OTHER; note = 2'-O-methyl ribonucleotide
  modified_base 89: mod_base = OTHER; note = 2'-O-methyl ribonucleotide
  modified_base 90: mod_base = OTHER; note = 2'-O-methyl ribonucleotide
  modified_base 91: mod_base = OTHER; note = 2'-O-methyl ribonucleotide
  modified_base 92: mod_base = OTHER; note = 2'-O-methyl ribonucleotide
  modified_base 93: mod_base = OTHER; note = 2'-O-methyl ribonucleotide
  modified_base 94: mod_base = OTHER; note = 2'-O-methyl ribonucleotide
  modified_base 95: mod_base = OTHER; note = 2'-O-methyl ribonucleotide
  modified_base 96: mod_base = OTHER; note = 2'-O-methyl ribonucleotide
  modified_base 97: mod_base = OTHER; note = 2'-O-methyl ribonucleotide
  modified_base 98: mod_base = OTHER; note = 2'-O-methyl ribonucleotide
  modified_base 99: mod_base = OTHER; note = 2'-O-methyl ribonucleotide
  modified_base 100: mod_base = OTHER; note = 2'-O-methyl ribonucleotide
  modified_base 101: mod_base = OTHER; note = uniform ribonucleotides (A, C, G, inosine or U), deoxynucleotides (A, G, C, inosine or T), ribonebularine, 2'-O-methylnebularine or deoxynebularine
  modified_base 102: mod_base = OTHER; note = uniform ribonucleotides (A, C, G, inosine or U), deoxynucleotides (A, G, C, inosine or T), ribonebularine, 2'-O-methylnebularine or deoxynebularine
  modified_base 103: mod_base = OTHER; note = uniform ribonucleotides (A, C, G, inosine or U), deoxynucleotides (A, G, C, inosine or T), ribonebularine, 2'-O-methylnebularine or deoxynebularine
  modified_base 1..3: mod_base = OTHER; note = phosphorothioate linkage
  modified_base 64..65: mod_base = OTHER; note = phosphorothioate linkage
  modified_base 98..100: mod_base = OTHER; note = phosphorothioate linkage
  misc_feature 1..100: note = RNA
  misc_feature 101..103: note = Optionally DNA or RNA

SEQ ID NO: 3078 - DNA, 103 bp, synthetic construct; identical to SEQ ID NO: 1797
  source 1..103: mol_type = other DNA
  modified_base 1: mod_base = OTHER; note = 2'-O-methyl ribonucleotide
  modified_base 2: mod_base = OTHER; note = 2'-O-methyl ribonucleotide
  modified_base 3: mod_base = OTHER; note = 2'-O-methyl ribonucleotide
  modified_base 21: mod_base = OTHER; note = 2'-O-methyl ribonucleotide
  modified_base 28: mod_base = OTHER; note = 2'-O-methyl ribonucleotide
  modified_base 29: mod_base = OTHER; note = 2'-O-methyl ribonucleotide
  modified_base 30: mod_base = OTHER; note = 2'-O-methyl ribonucleotide
  modified_base 31: mod_base = OTHER; note = 2'-O-methyl ribonucleotide
  modified_base 32: mod_base = OTHER; note = 2'-O-methyl ribonucleotide
  modified_base 33: mod_base = OTHER; note = 2'-O-methyl ribonucleotide
  modified_base 34: mod_base = OTHER; note = 2'-O-methyl ribonucleotide
  modified_base 35: mod_base = OTHER; note = 2'-O-methyl ribonucleotide
  modified_base 36: mod_base = OTHER; note = 2'-O-methyl ribonucleotide
  modified_base 37: mod_base = OTHER; note = 2'-O-methyl ribonucleotide
  modified_base 38: mod_base = OTHER; note = 2'-O-methyl ribonucleotide
  modified_base 39: mod_base = OTHER; note = 2'-O-methyl ribonucleotide
  modified_base 40: mod_base = OTHER; note = 2'-O-methyl ribonucleotide
  modified_base 41: mod_base = OTHER; note = 2'-O-methyl ribonucleotide
  modified_base 42: mod_base = OTHER; note = 2'-O-methyl ribonucleotide
  modified_base 46: mod_base = OTHER; note = 2'-O-methyl ribonucleotide
  modified_base 48: mod_base = OTHER; note = 2'-O-methyl ribonucleotide
  modified_base 50: mod_base = OTHER; note = 2'-O-methyl ribonucleotide
  modified_base 52: mod_base = OTHER; note = 2'-O-methyl ribonucleotide
  modified_base 53: mod_base = OTHER; note = 2'-O-methyl ribonucleotide
  modified_base 54: mod_base = OTHER; note = 2'-O-methyl ribonucleotide
  modified_base 57: mod_base = OTHER; note = 2'-O-methyl ribonucleotide
  modified_base 61: mod_base = OTHER; note = 2'-O-methyl ribonucleotide
  modified_base 66: mod_base = OTHER; note = 2'-O-methyl ribonucleotide
  modified_base 67: mod_base = OTHER; note = 2'-O-methyl ribonucleotide
  modified_base 70: mod_base = OTHER; note = 2'-O-methyl ribonucleotide
  modified_base 71: mod_base = OTHER; note = 2'-O-methyl ribonucleotide
  modified_base 72: mod_base = OTHER; note = 2'-O-methyl ribonucleotide
  modified_base 74: mod_base = OTHER; note = 2'-O-methyl ribonucleotide
  modified_base 75: mod_base = OTHER; note = 2'-O-methyl ribonucleotide
  modified_base 76: mod_base = OTHER; note = 2'-O-methyl ribonucleotide
  modified_base 77: mod_base = OTHER; note = 2'-O-methyl ribonucleotide
  modified_base 78: mod_base = OTHER; note = 2'-O-methyl ribonucleotide
  modified_base 79: mod_base = OTHER; note = 2'-O-methyl ribonucleotide
  modified_base 80: mod_base = OTHER; note = 2'-O-methyl ribonucleotide
  modified_base 82: mod_base = OTHER; note = 2'-O-methyl ribonucleotide
  modified_base 83: mod_base = OTHER; note = 2'-O-methyl ribonucleotide
  modified_base 84: mod_base = OTHER; note = 2'-O-methyl ribonucleotide
  modified_base 85: mod_base = OTHER; note = 2'-O-methyl ribonucleotide
  modified_base 86: mod_base = OTHER; note = 2'-O-methyl ribonucleotide
  modified_base 87: mod_base = OTHER; note = 2'-O-methyl ribonucleotide
  modified_base 89: mod_base = OTHER; note = 2'-O-methyl ribonucleotide
  modified_base 92: mod_base = OTHER; note = 2'-O-methyl ribonucleotide
  modified_base 93: mod_base = OTHER; note = 2'-O-methyl ribonucleotide
  modified_base 94: mod_base = OTHER; note = 2'-O-methyl ribonucleotide
  modified_base 95: mod_base = OTHER; note = 2'-O-methyl ribonucleotide
  modified_base 96: mod_base = OTHER; note = 2'-O-methyl ribonucleotide
  modified_base 97: mod_base = OTHER; note = 2'-O-methyl ribonucleotide
  modified_base 98: mod_base = OTHER; note = 2'-O-methyl ribonucleotide
  modified_base 99: mod_base = OTHER; note = 2'-O-methyl ribonucleotide
  modified_base 100: mod_base = OTHER; note = 2'-O-methyl ribonucleotide
  modified_base 101: mod_base = OTHER; note = uniform ribonucleotides (A, C, G, inosine or U), deoxynucleotides (A, G, C, inosine or T), ribonebularine, 2'-O-methylnebularine or deoxynebularine
  modified_base 102: mod_base = OTHER; note = uniform ribonucleotides (A, C, G, inosine or U), deoxynucleotides (A, G, C, inosine or T), ribonebularine, 2'-O-methylnebularine or deoxynebularine
  modified_base 103: mod_base = OTHER; note = uniform ribonucleotides (A, C, G, inosine or U), deoxynucleotides (A, G, C, inosine or T), ribonebularine, 2'-O-methylnebularine or deoxynebularine
  modified_base 1..3: mod_base = OTHER; note = phosphorothioate linkage
  modified_base 64..65: mod_base = OTHER; note = phosphorothioate linkage
  modified_base 98..100: mod_base = OTHER; note = phosphorothioate linkage
  misc_feature 1..100: note = RNA
  misc_feature 101..103: note = Optionally DNA or RNA

SEQ ID NO: 3079 - DNA, 103 bp, synthetic construct; identical to SEQ ID NO: 1797
  source 1..103: mol_type = other DNA
  modified_base 1: mod_base = OTHER; note = 2'-O-methyl ribonucleotide
  modified_base 2: mod_base = OTHER; note = 2'-O-methyl ribonucleotide
  modified_base 3: mod_base = OTHER; note = 2'-O-methyl ribonucleotide
  modified_base 21: mod_base = OTHER; note = 2'-O-methyl ribonucleotide
  modified_base 28: mod_base = OTHER; note = 2'-O-methyl ribonucleotide
  modified_base 29: mod_base = OTHER; note = 2'-O-methyl ribonucleotide
  modified_base 30: mod_base = OTHER; note = 2'-O-methyl ribonucleotide
  modified_base 31: mod_base = OTHER; note = 2'-O-methyl ribonucleotide
  modified_base 32: mod_base = OTHER; note = 2'-O-methyl ribonucleotide
  modified_base 33: mod_base = OTHER; note = 2'-O-methyl ribonucleotide
  modified_base 34: mod_base = OTHER; note = 2'-O-methyl ribonucleotide
  modified_base 35: mod_base = OTHER; note = 2'-O-methyl ribonucleotide
  modified_base 36: mod_base = OTHER; note = 2'-O-methyl ribonucleotide
  modified_base 37: mod_base = OTHER; note = 2'-O-methyl ribonucleotide
  modified_base 38: mod_base = OTHER; note = 2'-O-methyl ribonucleotide
  modified_base 39: mod_base = OTHER; note = 2'-O-methyl ribonucleotide
  modified_base 40: mod_base = OTHER; note = 2'-O-methyl ribonucleotide
  modified_base 41: mod_base = OTHER; note = 2'-O-methyl ribonucleotide
  modified_base 42: mod_base = OTHER; note = 2'-O-methyl ribonucleotide
  modified_base 46: mod_base = OTHER; note = 2'-O-methyl ribonucleotide
  modified_base 48: mod_base = OTHER; note = 2'-O-methyl ribonucleotide
  modified_base 50: mod_base = OTHER; note = 2'-O-methyl ribonucleotide
  modified_base 52: mod_base = OTHER; note = 2'-O-methyl ribonucleotide
  modified_base 53: mod_base = OTHER; note = 2'-O-methyl ribonucleotide
  modified_base 54: mod_base = OTHER; note = 2'-O-methyl ribonucleotide
  modified_base 55: mod_base = OTHER; note = 2'-O-methyl ribonucleotide
  modified_base 56: mod_base = OTHER; note = 2'-O-methyl ribonucleotide
  modified_base 57: mod_base = OTHER; note = 2'-O-methyl ribonucleotide
  modified_base 60: mod_base = OTHER; note = 2'-O-methyl ribonucleotide
  modified_base 61: mod_base = OTHER; note = 2'-O-methyl ribonucleotide
  modified_base 66: mod_base = OTHER; note = 2'-O-methyl ribonucleotide
  modified_base 67: mod_base = OTHER; note = 2'-O-methyl ribonucleotide
  modified_base 70: mod_base = OTHER; note = 2'-O-methyl ribonucleotide
  modified_base 71: mod_base = OTHER; note = 2'-O-methyl ribonucleotide
  modified_base 72: mod_base = OTHER; note = 2'-O-methyl ribonucleotide
  modified_base 74: mod_base = OTHER; note = 2'-O-methyl ribonucleotide
  modified_base 75: mod_base = OTHER; note = 2'-O-methyl ribonucleotide
  modified_base 76: mod_base = OTHER; note = 2'-O-methyl ribonucleotide
  modified_base 77: mod_base = OTHER; note = 2'-O-methyl ribonucleotide
  modified_base 78: mod_base = OTHER; note = 2'-O-methyl ribonucleotide
  modified_base 79: mod_base = OTHER; note = 2'-O-methyl ribonucleotide
  modified_base 80: mod_base = OTHER; note = 2'-O-methyl ribonucleotide
  modified_base 82: mod_base = OTHER; note = 2'-O-methyl ribonucleotide
  modified_base 83: mod_base = OTHER; note = 2'-O-methyl ribonucleotide
  modified_base 84: mod_base = OTHER; note = 2'-O-methyl ribonucleotide
  modified_base 85: mod_base = OTHER; note = 2'-O-methyl ribonucleotide
  modified_base 86: mod_base = OTHER; note = 2'-O-methyl ribonucleotide
  modified_base 87: mod_base = OTHER; note = 2'-O-methyl ribonucleotide
  modified_base 89: mod_base = OTHER; note = 2'-O-methyl ribonucleotide
  modified_base 92: mod_base = OTHER; note = 2'-O-methyl ribonucleotide
  modified_base 93: mod_base = OTHER; note = 2'-O-methyl ribonucleotide
  modified_base 94: mod_base = OTHER; note = 2'-O-methyl ribonucleotide
  modified_base 95: mod_base = OTHER; note = 2'-O-methyl ribonucleotide
  modified_base 96: mod_base = OTHER; note = 2'-O-methyl ribonucleotide
  modified_base 97: mod_base = OTHER; note = 2'-O-methyl ribonucleotide
  modified_base 98: mod_base = OTHER; note = 2'-O-methyl ribonucleotide
  modified_base 99: mod_base = OTHER; note = 2'-O-methyl ribonucleotide
  modified_base 100: mod_base = OTHER; note = 2'-O-methyl ribonucleotide
  modified_base 101: mod_base = OTHER; note = uniform ribonucleotides (A, C, G, inosine or U), deoxynucleotides (A, G, C, inosine or T), ribonebularine, 2'-O-methylnebularine or deoxynebularine
  modified_base 102: mod_base = OTHER; note = uniform ribonucleotides (A, C, G, inosine or U), deoxynucleotides (A, G, C, inosine or T), ribonebularine, 2'-O-methylnebularine or deoxynebularine
  modified_base 103: mod_base = OTHER; note = uniform ribonucleotides (A, C, G, inosine or U), deoxynucleotides (A, G, C, inosine or T), ribonebularine, 2'-O-methylnebularine or deoxynebularine
  modified_base 1..3: mod_base = OTHER; note = phosphorothioate linkage
  modified_base 64..65: mod_base = OTHER; note = phosphorothioate linkage
  modified_base 98..100: mod_base = OTHER; note = phosphorothioate linkage
  misc_feature 1..100: note = RNA
  misc_feature 101..103: note = Optionally DNA or RNA

SEQ ID NO: 3080 - DNA, 103 bp, synthetic construct; identical to SEQ ID NO: 1797
  source 1..103: mol_type = other DNA
  modified_base 1: mod_base = OTHER; note = 2'-O-methyl ribonucleotide
  modified_base 2: mod_base = OTHER; note = 2'-O-methyl ribonucleotide
  modified_base 3: mod_base = OTHER; note = 2'-O-methyl ribonucleotide
  modified_base 21: mod_base = OTHER; note = 2'-O-methyl ribonucleotide
  modified_base 28: mod_base = OTHER; note = 2'-O-methyl ribonucleotide
  modified_base 29: mod_base = OTHER; note = 2'-O-methyl ribonucleotide
  modified_base 30: mod_base = OTHER; note = 2'-O-methyl ribonucleotide
  modified_base 31: mod_base = OTHER; note = 2'-O-methyl ribonucleotide
  modified_base 32: mod_base = OTHER; note = 2'-O-methyl ribonucleotide
  modified_base 33: mod_base = OTHER; note = 2'-O-methyl ribonucleotide
  modified_base 34: mod_base = OTHER; note = 2'-O-methyl ribonucleotide
  modified_base 35: mod_base = OTHER; note = 2'-O-methyl ribonucleotide
  modified_base 36: mod_base = OTHER; note = 2'-O-methyl ribonucleotide
  modified_base 37: mod_base = OTHER; note = 2'-O-methyl ribonucleotide
  modified_base 38: mod_base = OTHER; note = 2'-O-methyl ribonucleotide
  modified_base 39: mod_base = OTHER; note = 2'-O-methyl ribonucleotide
  modified_base 40: mod_base = OTHER; note = 2'-O-methyl ribonucleotide
  modified_base 41: mod_base = OTHER; note = 2'-O-methyl ribonucleotide
  modified_base 42: mod_base = OTHER; note = 2'-O-methyl ribonucleotide
  modified_base 46: mod_base = OTHER; note = 2'-O-methyl ribonucleotide
  modified_base 48: mod_base = OTHER; note = 2'-O-methyl ribonucleotide
  modified_base 50: mod_base = OTHER; note = 2'-O-methyl ribonucleotide
  modified_base 52: mod_base = OTHER; note = 2'-O-methyl ribonucleotide
  modified_base 53: mod_base = OTHER; note = 2'-O-methyl ribonucleotide
  modified_base 54: mod_base = OTHER; note = 2'-O-methyl ribonucleotide
  modified_base 57: mod_base = OTHER; note = 2'-O-methyl ribonucleotide
  modified_base 61: mod_base = OTHER; note = 2'-O-methyl ribonucleotide
  modified_base 66: mod_base = OTHER; note = 2'-O-methyl ribonucleotide
  modified_base 67: mod_base = OTHER; note = 2'-O-methyl ribonucleotide
  modified_base 70: mod_base = OTHER; note = 2'-O-methyl ribonucleotide
  modified_base 71: mod_base = OTHER; note = 2'-O-methyl ribonucleotide
  modified_base 72: mod_base = OTHER; note = 2'-O-methyl ribonucleotide
  modified_base 73: mod_base = OTHER; note = 2'-O-methyl ribonucleotide
  modified_base 74: mod_base = OTHER; note = 2'-O-methyl ribonucleotide
  modified_base 75: mod_base = OTHER; note = 2'-O-methyl ribonucleotide
  modified_base 76: mod_base = OTHER; note = 2'-O-methyl ribonucleotide
  modified_base 77: mod_base = OTHER; note = 2'-O-methyl ribonucleotide
  modified_base 78: mod_base = OTHER; note = 2'-O-methyl ribonucleotide
  modified_base 79: mod_base = OTHER; note = 2'-O-methyl ribonucleotide
  modified_base 80: mod_base = OTHER; note = 2'-O-methyl ribonucleotide
  modified_base 82: mod_base = OTHER; note = 2'-O-methyl ribonucleotide
  modified_base 83: mod_base = OTHER; note = 2'-O-methyl ribonucleotide
  modified_base 84: mod_base = OTHER; note = 2'-O-methyl ribonucleotide
  modified_base 85: mod_base = OTHER; note = 2'-O-methyl ribonucleotide
  modified_base 86: mod_base = OTHER; note = 2'-O-methyl ribonucleotide
  modified_base 87: mod_base = OTHER; note = 2'-O-methyl ribonucleotide
  modified_base 89: mod_base = OTHER; note = 2'-O-methyl ribonucleotide
  modified_base 92: mod_base = OTHER; note = 2'-O-methyl ribonucleotide
  modified_base 93: mod_base = OTHER; note = 2'-O-methyl ribonucleotide
  modified_base 94: mod_base = OTHER; note = 2'-O-methyl ribonucleotide
  modified_base 95: mod_base = OTHER; note = 2'-O-methyl ribonucleotide
  modified_base 96: mod_base = OTHER; note = 2'-O-methyl ribonucleotide
  modified_base 97: mod_base = OTHER; note = 2'-O-methyl ribonucleotide
  modified_base 98: mod_base = OTHER; note = 2'-O-methyl ribonucleotide
  modified_base 99: mod_base = OTHER; note = 2'-O-methyl ribonucleotide
  modified_base 100: mod_base = OTHER; note = 2'-O-methyl ribonucleotide
  modified_base 101: mod_base = OTHER; note = uniform ribonucleotides (A, C, G, inosine or U), deoxynucleotides (A, G, C, inosine or T), ribonebularine, 2'-O-methylnebularine or deoxynebularine
  modified_base 102: mod_base = OTHER; note = uniform ribonucleotides (A, C, G, inosine or U), deoxynucleotides (A, G, C, inosine or T), ribonebularine, 2'-O-methylnebularine or deoxynebularine
  modified_base 103: mod_base = OTHER; note = uniform ribonucleotides (A, C, G, inosine or U), deoxynucleotides (A, G, C, inosine or T), ribonebularine, 2'-O-methylnebularine or deoxynebularine
  modified_base 1..3: mod_base = OTHER; note = phosphorothioate linkage
  modified_base 64..65: mod_base = OTHER; note = phosphorothioate linkage
  modified_base 98..100: mod_base = OTHER; note = phosphorothioate linkage
  misc_feature 1..100: note = RNA
  misc_feature 101..103: note = Optionally DNA or RNA

SEQ ID NO: 3081 - DNA, 103 bp, synthetic construct; identical to SEQ ID NO: 1797
  source 1..103: mol_type = other DNA
  modified_base 1: mod_base = OTHER; note = 2'-O-methyl ribonucleotide
  modified_base 2: mod_base = OTHER; note = 2'-O-methyl ribonucleotide
  modified_base 3: mod_base = OTHER; note = 2'-O-methyl ribonucleotide
  modified_base 21: mod_base = OTHER; note = 2'-O-methyl ribonucleotide
  modified_base 28: mod_base = OTHER; note = 2'-O-methyl ribonucleotide
  modified_base 29: mod_base = OTHER; note = 2'-O-methyl ribonucleotide
  modified_base 30: mod_base = OTHER; note = 2'-O-methyl ribonucleotide
  modified_base 31: mod_base = OTHER; note = 2'-O-methyl ribonucleotide
  modified_base 32: mod_base = OTHER; note = 2'-O-methyl ribonucleotide
  modified_base 33: mod_base = OTHER; note = 2'-O-methyl ribonucleotide
  modified_base 34: mod_base = OTHER; note = 2'-O-methyl ribonucleotide
  modified_base 35: mod_base = OTHER; note = 2'-O-methyl ribonucleotide
  modified_base 36: mod_base = OTHER; note = 2'-O-methyl ribonucleotide
  modified_base 37: mod_base = OTHER; note = 2'-O-methyl ribonucleotide
  modified_base 38: mod_base = OTHER; note = 2'-O-methyl ribonucleotide
  modified_base 39: mod_base = OTHER; note = 2'-O-methyl ribonucleotide
  modified_base 40: mod_base = OTHER; note = 2'-O-methyl ribonucleotide
  modified_base 41: mod_base = OTHER; note = 2'-O-methyl ribonucleotide
  modified_base 42: mod_base = OTHER; note = 2'-O-methyl ribonucleotide
  modified_base 46: mod_base = OTHER; note = 2'-O-methyl ribonucleotide
  modified_base 48: mod_base = OTHER; note = 2'-O-methyl ribonucleotide
  modified_base 50: mod_base = OTHER; note = 2'-O-methyl ribonucleotide
  modified_base 52: mod_base = OTHER; note = 2'-O-methyl ribonucleotide
  modified_base 53: mod_base = OTHER; note = 2'-O-methyl ribonucleotide
  modified_base 54: mod_base = OTHER; note = 2'-O-methyl ribonucleotide
  modified_base 57: mod_base = OTHER; note = 2'-O-methyl ribonucleotide
  modified_base 61: mod_base = OTHER; note = 2'-O-methyl ribonucleotide
  modified_base 66: mod_base = OTHER; note = 2'-O-methyl ribonucleotide
  modified_base 67: mod_base = OTHER; note = 2'-O-methyl ribonucleotide
  modified_base 70: mod_base = OTHER; note = 2'-O-methyl ribonucleotide
  modified_base 71: mod_base = OTHER; note = 2'-O-methyl ribonucleotide
  modified_base 72: mod_base = OTHER; note = 2'-O-methyl ribonucleotide
  modified_base 73: mod_base = OTHER; note = 2'-O-methyl ribonucleotide
  modified_base 74: mod_base = OTHER; note = 2'-O-methyl ribonucleotide
  modified_base 75: mod_base = OTHER; note = 2'-O-methyl ribonucleotide
  modified_base 76: mod_base = OTHER; note = 2'-O-methyl ribonucleotide
  modified_base 77: mod_base = OTHER; note = 2'-O-methyl ribonucleotide
  modified_base 78: mod_base = OTHER; note = 2'-O-methyl ribonucleotide
  modified_base 79: mod_base = OTHER; note = 2'-O-methyl ribonucleotide
  modified_base 80: mod_base = OTHER; note = 2'-O-methyl ribonucleotide
  modified_base 82: mod_base = OTHER; note = 2'-O-methyl ribonucleotide
  modified_base 83: mod_base = OTHER; note = 2'-O-methyl ribonucleotide
  modified_base 84: mod_base = OTHER; note = 2'-O-methyl ribonucleotide
  modified_base 85: mod_base = OTHER; note = 2'-O-methyl ribonucleotide
  modified_base 86: mod_base = OTHER; note = 2'-O-methyl ribonucleotide
  modified_base 87: mod_base = OTHER; note = 2'-O-methyl ribonucleotide
  modified_base 89: mod_base = OTHER; note = 2'-O-methyl ribonucleotide
  modified_base 91: mod_base = OTHER; note = 2'-O-methyl ribonucleotide
  modified_base 92: mod_base = OTHER; note = 2'-O-methyl ribonucleotide
  modified_base 93: mod_base = OTHER; note = 2'-O-methyl ribonucleotide
  modified_base 94: mod_base = OTHER; note = 2'-O-methyl ribonucleotide
  modified_base 95: mod_base = OTHER; note = 2'-O-methyl ribonucleotide
  modified_base 96: mod_base = OTHER; note = 2'-O-methyl ribonucleotide
  modified_base 97: mod_base = OTHER; note = 2'-O-methyl ribonucleotide
  modified_base 98: mod_base = OTHER; note = 2'-O-methyl ribonucleotide
  modified_base 99: mod_base = OTHER; note = 2'-O-methyl ribonucleotide
  modified_base 100: mod_base = OTHER; note = 2'-O-methyl ribonucleotide
  modified_base 101: mod_base = OTHER; note = uniform ribonucleotides (A, C, G, inosine or U), deoxynucleotides (A, G, C, inosine or T), ribonebularine, 2'-O-methylnebularine or deoxynebularine
  modified_base 102: mod_base = OTHER; note = uniform ribonucleotides (A, C, G, inosine or U), deoxynucleotides (A, G, C, inosine or T), ribonebularine, 2'-O-methylnebularine or deoxynebularine
  modified_base 103: mod_base = OTHER; note = uniform ribonucleotides (A, C, G, inosine or U), deoxynucleotides (A, G, C, inosine or T), ribonebularine, 2'-O-methylnebularine or deoxynebularine
  modified_base 1..3: mod_base = OTHER; note = phosphorothioate linkage
  modified_base 64..65: mod_base = OTHER; note = phosphorothioate linkage
  modified_base 98..100: mod_base = OTHER; note = phosphorothioate linkage
  misc_feature 1..100: note = RNA
  misc_feature 101..103: note = Optionally DNA or RNA

SEQ ID NO: 3082 - DNA, 103 bp, synthetic construct; identical to SEQ ID NO: 1797
  source 1..103: mol_type = other DNA
  modified_base 1: mod_base = OTHER; note = 2'-O-methyl ribonucleotide
  modified_base 2: mod_base = OTHER; note = 2'-O-methyl ribonucleotide
  modified_base 3: mod_base = OTHER; note = 2'-O-methyl ribonucleotide
  modified_base 21: mod_base = OTHER; note = 2'-O-methyl ribonucleotide
  modified_base 28: mod_base = OTHER; note = 2'-O-methyl ribonucleotide
  modified_base 29: mod_base = OTHER; note = 2'-O-methyl ribonucleotide
  modified_base 30: mod_base = OTHER; note = 2'-O-methyl ribonucleotide
  modified_base 31: mod_base = OTHER; note = 2'-O-methyl ribonucleotide
  modified_base 32: mod_base = OTHER; note = 2'-O-methyl ribonucleotide
  modified_base 34: mod_base = OTHER; note = 2'-O-methyl ribonucleotide
  modified_base 35: mod_base = OTHER; note = 2'-O-methyl ribonucleotide
  modified_base 36: mod_base = OTHER; note = 2'-O-methyl ribonucleotide
  modified_base 37: mod_base = OTHER; note = 2'-O-methyl ribonucleotide
  modified_base 38: mod_base = OTHER; note = 2'-O-methyl ribonucleotide
  modified_base 39: mod_base = OTHER; note = 2'-O-methyl ribonucleotide
  modified_base 40: mod_base = OTHER; note = 2'-O-methyl ribonucleotide
  modified_base 41: mod_base = OTHER; note = 2'-O-methyl ribonucleotide
  modified_base 42: mod_base = OTHER; note = 2'-O-methyl ribonucleotide
  modified_base 46: mod_base = OTHER; note = 2'-O-methyl ribonucleotide
  modified_base 48: mod_base = OTHER; note = 2'-O-methyl ribonucleotide
  modified_base 50: mod_base = OTHER; note = 2'-O-methyl ribonucleotide
  modified_base 52: mod_base = OTHER; note = 2'-O-methyl ribonucleotide
  modified_base 53: mod_base = OTHER; note = 2'-O-methyl ribonucleotide
  modified_base 54: mod_base = OTHER; note = 2'-O-methyl ribonucleotide
  modified_base 57: mod_base = OTHER; note = 2'-O-methyl ribonucleotide
  modified_base 61: mod_base = OTHER; note = 2'-O-methyl ribonucleotide
  modified_base 66: mod_base = OTHER; note = 2'-O-methyl ribonucleotide
  modified_base 67: mod_base = OTHER; note = 2'-O-methyl ribonucleotide
  modified_base 70: mod_base = OTHER; note = 2'-O-methyl ribonucleotide
  modified_base 71: mod_base = OTHER; note = 2'-O-methyl ribonucleotide
  modified_base 72: mod_base = OTHER; note = 2'-O-methyl ribonucleotide
  modified_base 73: mod_base = OTHER; note = 2'-O-methyl ribonucleotide
  modified_base 74: mod_base = OTHER; note = 2'-O-methyl ribonucleotide
  modified_base 75: mod_base = OTHER; note = 2'-O-methyl ribonucleotide
  modified_base 76: mod_base = OTHER; note = 2'-O-methyl ribonucleotide
  modified_base 77: mod_base = OTHER; note = 2'-O-methyl ribonucleotide
  modified_base 78: mod_base = OTHER; note = 2'-O-methyl ribonucleotide
  modified_base 79: mod_base = OTHER; note = 2'-O-methyl ribonucleotide
  modified_base 80: mod_base = OTHER; note = 2'-O-methyl ribonucleotide
  modified_base 82: mod_base = OTHER; note = 2'-O-methyl ribonucleotide
  modified_base 83: mod_base = OTHER; note = 2'-O-methyl ribonucleotide
  modified_base 84: mod_base = OTHER; note = 2'-O-methyl ribonucleotide
  modified_base 85: mod_base = OTHER; note = 2'-O-methyl ribonucleotide
  modified_base 86: mod_base = OTHER; note = 2'-O-methyl ribonucleotide
  modified_base 87: mod_base = OTHER; note = 2'-O-methyl ribonucleotide
  modified_base 89: mod_base = OTHER; note = 2'-O-methyl ribonucleotide
  modified_base 92: mod_base = OTHER; note = 2'-O-methyl ribonucleotide
  modified_base 93: mod_base = OTHER; note = 2'-O-methyl ribonucleotide
  modified_base 94: mod_base = OTHER; note = 2'-O-methyl ribonucleotide
  modified_base 95: mod_base = OTHER; note = 2'-O-methyl ribonucleotide
  modified_base 96: mod_base = OTHER; note = 2'-O-methyl ribonucleotide
  modified_base 97: mod_base = OTHER; note = 2'-O-methyl ribonucleotide
  modified_base 98: mod_base = OTHER; note = 2'-O-methyl ribonucleotide
  modified_base 99: mod_base = OTHER; note = 2'-O-methyl ribonucleotide
  modified_base 100: mod_base = OTHER; note = 2'-O-methyl ribonucleotide
  modified_base 101: mod_base = OTHER; note = uniform ribonucleotides (A, C, G, inosine or U), deoxynucleotides (A, G, C, inosine or T), ribonebularine, 2'-O-methylnebularine or deoxynebularine
  modified_base 102: mod_base = OTHER; note = uniform ribonucleotides (A, C, G, inosine or U), deoxynucleotides (A, G, C, inosine or T), ribonebularine, 2'-O-methylnebularine or deoxynebularine
  modified_base 103: mod_base = OTHER; note = uniform ribonucleotides (A, C, G, inosine or U), deoxynucleotides (A, G, C, inosine or T), ribonebularine, 2'-O-methylnebularine or deoxynebularine
  modified_base 1..3: mod_base = OTHER; note = phosphorothioate linkage
  modified_base 64..65: mod_base = OTHER; note = phosphorothioate linkage
  modified_base 98..100: mod_base = OTHER; note = phosphorothioate linkage
  misc_feature 1..100: note = RNA
  misc_feature 101..103: note = Optionally DNA or RNA

SEQ ID NO: 3083 - DNA, 103 bp, synthetic construct; identical to SEQ ID NO: 1797
  source 1..103: mol_type = other DNA
  modified_base 1: mod_base = OTHER; note = 2'-O-methyl ribonucleotide
  modified_base 2: mod_base = OTHER; note = 2'-O-methyl ribonucleotide
  modified_base 3: mod_base = OTHER; note = 2'-O-methyl ribonucleotide
  modified_base 21: mod_base = OTHER; note = 2'-O-methyl ribonucleotide
  modified_base 28: mod_base = OTHER; note = 2'-O-methyl ribonucleotide
  modified_base 29: mod_base = OTHER; note = 2'-O-methyl ribonucleotide
  modified_base 30: mod_base = OTHER; note = 2'-O-methyl ribonucleotide
  modified_base 31: mod_base = OTHER; note = 2'-O-methyl ribonucleotide
  modified_base 32: mod_base = OTHER; note = 2'-O-methyl ribonucleotide
  modified_base 34: mod_base = OTHER; note = 2'-O-methyl ribonucleotide
  modified_base 35: mod_base = OTHER; note = 2'-O-methyl ribonucleotide
  modified_base 36: mod_base = OTHER; note = 2'-O-methyl ribonucleotide
  modified_base 37: mod_base = OTHER; note = 2'-O-methyl ribonucleotide
  modified_base 38: mod_base = OTHER; note = 2'-O-methyl ribonucleotide
  modified_base 39: mod_base = OTHER; note = 2'-O-methyl ribonucleotide
  modified_base 40: mod_base = OTHER; note = 2'-O-methyl ribonucleotide
  modified_base 41: mod_base = OTHER; note = 2'-O-methyl ribonucleotide
  modified_base 42: mod_base = OTHER; note = 2'-O-methyl ribonucleotide
  modified_base 46: mod_base = OTHER; note = 2'-O-methyl ribonucleotide
  modified_base 48: mod_base = OTHER; note = 2'-O-methyl ribonucleotide
  modified_base 50: mod_base = OTHER; note = 2'-O-methyl ribonucleotide
  modified_base 52: mod_base = OTHER; note = 2'-O-methyl ribonucleotide
  modified_base 53: mod_base = OTHER; note = 2'-O-methyl ribonucleotide
  modified_base 54: mod_base = OTHER; note = 2'-O-methyl ribonucleotide
  modified_base 57: mod_base = OTHER; note = 2'-O-methyl ribonucleotide
  modified_base 61: mod_base = OTHER; note = 2'-O-methyl ribonucleotide
  modified_base 66: mod_base = OTHER; note = 2'-O-methyl ribonucleotide
  modified_base 67: mod_base = OTHER; note = 2'-O-methyl ribonucleotide
  modified_base 70: mod_base = OTHER; note = 2'-O-methyl ribonucleotide
  modified_base 71: mod_base = OTHER; note = 2'-O-methyl ribonucleotide
  modified_base 72: mod_base = OTHER; note = 2'-O-methyl ribonucleotide
  modified_base 73: mod_base = OTHER; note = 2'-O-methyl ribonucleotide
  modified_base 74: mod_base = OTHER; note = 2'-O-methyl ribonucleotide
  modified_base 75: mod_base = OTHER; note = 2'-O-methyl ribonucleotide
  modified_base 76: mod_base = OTHER; note = 2'-O-methyl ribonucleotide
  modified_base 77: mod_base = OTHER; note = 2'-O-methyl ribonucleotide
  modified_base 78: mod_base = OTHER; note = 2'-O-methyl ribonucleotide
  modified_base 79: mod_base = OTHER; note = 2'-O-methyl ribonucleotide
  modified_base 80: mod_base = OTHER; note = 2'-O-methyl ribonucleotide
  modified_base 82: mod_base = OTHER; note = 2'-O-methyl ribonucleotide
  modified_base 83: mod_base = OTHER; note = 2'-O-methyl ribonucleotide
  modified_base 84: mod_base = OTHER; note = 2'-O-methyl ribonucleotide
  modified_base 85: mod_base = OTHER; note = 2'-O-methyl ribonucleotide
  modified_base 86: mod_base = OTHER; note = 2'-O-methyl ribonucleotide
  modified_base 87: mod_base = OTHER; note = 2'-O-methyl ribonucleotide
  modified_base 89: mod_base = OTHER; note = 2'-O-methyl ribonucleotide
  modified_base 91: mod_base = OTHER; note = 2'-O-methyl ribonucleotide
  modified_base 92: mod_base = OTHER; note = 2'-O-methyl ribonucleotide
  modified_base 93: mod_base = OTHER; note = 2'-O-methyl ribonucleotide
  modified_base 94: mod_base = OTHER; note = 2'-O-methyl ribonucleotide
  modified_base 95: mod_base = OTHER; note = 2'-O-methyl ribonucleotide
  modified_base 96: mod_base = OTHER; note = 2'-O-methyl ribonucleotide
  modified_base 97: mod_base = OTHER; note = 2'-O-methyl ribonucleotide
  modified_base 98: mod_base = OTHER; note = 2'-O-methyl ribonucleotide
  modified_base 99: mod_base = OTHER; note = 2'-O-methyl ribonucleotide
  modified_base 100: mod_base = OTHER; note = 2'-O-methyl ribonucleotide
  modified_base 101: mod_base = OTHER; note = uniform ribonucleotides (A, C, G, inosine or U), deoxynucleotides (A, G, C, inosine or T), ribonebularine, 2'-O-methylnebularine or deoxynebularine
  modified_base 102: mod_base = OTHER; note = uniform ribonucleotides (A, C, G, inosine or U), deoxynucleotides (A, G, C, inosine or T), ribonebularine, 2'-O-methylnebularine or deoxynebularine
  modified_base 103: mod_base = OTHER; note = uniform ribonucleotides (A, C, G, inosine or U), deoxynucleotides (A, G, C, inosine or T), ribonebularine, 2'-O-methylnebularine or deoxynebularine
  modified_base 1..3: mod_base = OTHER; note = phosphorothioate linkage
  modified_base 64..65: mod_base = OTHER; note = phosphorothioate linkage
  modified_base 98..100: mod_base = OTHER; note = phosphorothioate linkage
  misc_feature 1..100: note = RNA
  misc_feature 101..103: note = Optionally DNA or RNA

SEQ ID NO: 3084 - DNA, 103 bp, synthetic construct; identical to SEQ ID NO: 1797
  source 1..103: mol_type = other DNA
  modified_base 1: mod_base = OTHER; note = 2'-O-methyl ribonucleotide
  modified_base 2: mod_base = OTHER; note = 2'-O-methyl ribonucleotide
  modified_base 3: mod_base = OTHER; note = 2'-O-methyl ribonucleotide
  modified_base 21: mod_base = OTHER; note = 2'-O-methyl ribonucleotide
  modified_base 28: mod_base = OTHER; note = 2'-O-methyl ribonucleotide
  modified_base 29: mod_base = OTHER; note = 2'-O-methyl ribonucleotide
  modified_base 30: mod_base = OTHER; note = 2'-O-methyl ribonucleotide
  modified_base 31: mod_base = OTHER; note = 2'-O-methyl ribonucleotide
  modified_base 32: mod_base = OTHER; note = 2'-O-methyl ribonucleotide
  modified_base 34: mod_base = OTHER; note = 2'-O-methyl ribonucleotide
  modified_base 35: mod_base = OTHER; note = 2'-O-methyl ribonucleotide
  modified_base 36: mod_base = OTHER; note = 2'-O-methyl ribonucleotide
  modified_base 37: mod_base = OTHER; note = 2'-O-methyl ribonucleotide
  modified_base 38: mod_base = OTHER; note = 2'-O-methyl ribonucleotide
  modified_base 39: mod_base = OTHER; note = 2'-O-methyl ribonucleotide
  modified_base 40: mod_base = OTHER; note = 2'-O-methyl ribonucleotide
  modified_base 41: mod_base = OTHER; note = 2'-O-methyl ribonucleotide
  modified_base 42: mod_base = OTHER; note = 2'-O-methyl ribonucleotide
  modified_base 46: mod_base = OTHER; note = 2'-O-methyl ribonucleotide
  modified_base 48: mod_base = OTHER; note = 2'-O-methyl ribonucleotide
  modified_base 50: mod_base = OTHER; note = 2'-O-methyl ribonucleotide
  modified_base 52: mod_base = OTHER; note = 2'-O-methyl ribonucleotide
  modified_base 53: mod_base = OTHER; note = 2'-O-methyl ribonucleotide
  modified_base 54: mod_base = OTHER; note = 2'-O-methyl ribonucleotide
  modified_base 55: mod_base = OTHER; note = 2'-O-methyl ribonucleotide
  modified_base 56: mod_base = OTHER; note = 2'-O-methyl ribonucleotide
  modified_base 57: mod_base = OTHER; note = 2'-O-methyl ribonucleotide
  modified_base 60: mod_base = OTHER; note = 2'-O-methyl ribonucleotide
  modified_base 61: mod_base = OTHER; note = 2'-O-methyl ribonucleotide
  modified_base 66: mod_base = OTHER; note = 2'-O-methyl ribonucleotide
  modified_base 67: mod_base = OTHER; note = 2'-O-methyl ribonucleotide
  modified_base 70: mod_base = OTHER; note = 2'-O-methyl ribonucleotide
  modified_base 71: mod_base = OTHER; note = 2'-O-methyl ribonucleotide
  modified_base 72: mod_base = OTHER; note = 2'-O-methyl ribonucleotide
  modified_base 74: mod_base = OTHER; note = 2'-O-methyl ribonucleotide
  modified_base 75: mod_base = OTHER; note = 2'-O-methyl ribonucleotide
  modified_base 76: mod_base = OTHER; note = 2'-O-methyl ribonucleotide
  modified_base 77: mod_base = OTHER; note = 2'-O-methyl ribonucleotide
  modified_base 78: mod_base = OTHER; note = 2'-O-methyl ribonucleotide
  modified_base 79: mod_base = OTHER; note = 2'-O-methyl ribonucleotide
  modified_base 80: mod_base = OTHER; note = 2'-O-methyl ribonucleotide
  modified_base 82: mod_base = OTHER; note = 2'-O-methyl ribonucleotide
  modified_base 83: mod_base = OTHER; note = 2'-O-methyl ribonucleotide
  modified_base 84: mod_base = OTHER; note = 2'-O-methyl ribonucleotide
  modified_base 85: mod_base = OTHER; note = 2'-O-methyl ribonucleotide
  modified_base 86: mod_base = OTHER; note = 2'-O-methyl ribonucleotide
  modified_base 87: mod_base = OTHER; note = 2'-O-methyl ribonucleotide
  modified_base 89: mod_base = OTHER; note = 2'-O-methyl ribonucleotide
  modified_base 92: mod_base = OTHER; note = 2'-O-methyl ribonucleotide
  modified_base 93: mod_base = OTHER; note = 2'-O-methyl ribonucleotide
  modified_base 94: mod_base = OTHER; note = 2'-O-methyl ribonucleotide
  modified_base 95: mod_base = OTHER; note = 2'-O-methyl ribonucleotide
  modified_base 96: mod_base = OTHER; note = 2'-O-methyl ribonucleotide
  modified_base 97: mod_base = OTHER; note = 2'-O-methyl ribonucleotide
  modified_base 98: mod_base = OTHER; note = 2'-O-methyl ribonucleotide
  modified_base 99: mod_base = OTHER; note = 2'-O-methyl ribonucleotide
  modified_base 100: mod_base = OTHER; note = 2'-O-methyl ribonucleotide
  modified_base 101: mod_base = OTHER; note = uniform ribonucleotides (A, C, G, inosine or U), deoxynucleotides (A, G, C, inosine or T), ribonebularine, 2'-O-methylnebularine or deoxynebularine
  modified_base 102: mod_base = OTHER; note = uniform ribonucleotides (A, C, G, inosine or U), deoxynucleotides (A, G, C, inosine or T), ribonebularine, 2'-O-methylnebularine or deoxynebularine
  modified_base 103: mod_base = OTHER; note = uniform ribonucleotides (A, C, G, inosine or U), deoxynucleotides (A, G, C, inosine or T), ribonebularine, 2'-O-methylnebularine or deoxynebularine
  modified_base 1..3: mod_base = OTHER; note = phosphorothioate linkage
  modified_base 64..65: mod_base = OTHER; note = phosphorothioate linkage
  modified_base 98..100: mod_base = OTHER; note = phosphorothioate linkage
  misc_feature 1..100: note = RNA
  misc_feature 101..103: note = Optionally DNA or RNA

SEQ ID NO: 3085 - DNA, 103 bp, synthetic construct; identical to SEQ ID NO: 1795
  source 1..103: mol_type = other DNA
  modified_base 1: mod_base = OTHER; note = 2'-O-methyl ribonucleotide
  modified_base 2: mod_base = OTHER; note = 2'-O-methyl ribonucleotide
  modified_base 3: mod_base = OTHER; note = 2'-O-methyl ribonucleotide
  modified_base 21: mod_base = OTHER; note = 2'-O-methyl ribonucleotide
  modified_base 28: mod_base = OTHER; note = 2'-O-methyl ribonucleotide
  modified_base 29: mod_base = OTHER; note = 2'-O-methyl ribonucleotide
  modified_base 30: mod_base = OTHER; note = 2'-O-methyl ribonucleotide
  modified_base 31: mod_base = OTHER; note = 2'-O-methyl ribonucleotide
  modified_base 32: mod_base = OTHER; note = 2'-O-methyl ribonucleotide
  modified_base 33: mod_base = OTHER; note = 2'-O-methyl ribonucleotide
  modified_base 34: mod_base = OTHER; note = 2'-O-methyl ribonucleotide
  modified_base 35: mod_base = OTHER; note = 2'-O-methyl ribonucleotide
  modified_base 36: mod_base = OTHER; note = 2'-O-methyl ribonucleotide
  modified_base 37: mod_base = OTHER; note = 2'-O-methyl ribonucleotide
  modified_base 38: mod_base = OTHER; note = 2'-O-methyl ribonucleotide
  modified_base 39: mod_base = OTHER; note = 2'-O-methyl ribonucleotide
  modified_base 40: mod_base = OTHER; note = 2'-O-methyl ribonucleotide
  modified_base 41: mod_base = OTHER; note = 2'-O-methyl ribonucleotide
  modified_base 42: mod_base = OTHER; note = 2'-O-methyl ribonucleotide
  modified_base 46: mod_base = OTHER; note = 2'-O-methyl ribonucleotide
  modified_base 48: mod_base = OTHER; note = 2'-O-methyl ribonucleotide
  modified_base 50: mod_base = OTHER; note = 2'-O-methyl ribonucleotide
  modified_base 52: mod_base = OTHER; note = 2'-O-methyl ribonucleotide
  modified_base 53: mod_base = OTHER; note = 2'-O-methyl ribonucleotide
  modified_base 54: mod_base = OTHER; note = 2'-O-methyl ribonucleotide
  modified_base 55: mod_base = OTHER; note = 2'-O-methyl ribonucleotide
  modified_base 56: mod_base = OTHER; note = 2'-O-methyl ribonucleotide
  modified_base 57: mod_base = OTHER; note = 2'-O-methyl ribonucleotide
  modified_base 60: mod_base = OTHER; note = 2'-O-methyl ribonucleotide
  modified_base 61: mod_base = OTHER; note = 2'-O-methyl ribonucleotide
  modified_base 66: mod_base = OTHER; note = 2'-O-methyl ribonucleotide
  modified_base 67: mod_base = OTHER; note = 2'-O-methyl ribonucleotide
  modified_base 70: mod_base = OTHER; note = 2'-O-methyl ribonucleotide
  modified_base 71: mod_base = OTHER; note = 2'-O-methyl ribonucleotide
  modified_base 72: mod_base = OTHER; note = 2'-O-methyl ribonucleotide
  modified_base 73: mod_base = OTHER; note = 2'-O-methyl ribonucleotide
  modified_base 74: mod_base = OTHER; note = 2'-O-methyl ribonucleotide
  modified_base 75: mod_base = OTHER; note = 2'-O-methyl ribonucleotide
  modified_base 76: mod_base = OTHER; note = 2'-O-methyl ribonucleotide
  modified_base 77: mod_base = OTHER; note = 2'-O-methyl ribonucleotide
  modified_base 78: mod_base = OTHER; note = 2'-O-methyl ribonucleotide
  modified_base 79: mod_base = OTHER; note = 2'-O-methyl ribonucleotide
  modified_base 80: mod_base = OTHER; note = 2'-O-methyl ribonucleotide
  modified_base 81: mod_base = OTHER; note = 2'-O-methyl ribonucleotide
  modified_base 83: mod_base = OTHER; note = 2'-O-methyl ribonucleotide
  modified_base 84: mod_base = OTHER; note = 2'-O-methyl ribonucleotide
  modified_base 85: mod_base = OTHER; note = 2'-O-methyl ribonucleotide
  modified_base 86: mod_base = OTHER; note = 2'-O-methyl ribonucleotide
  modified_base 87: mod_base = OTHER; note = 2'-O-methyl ribonucleotide
  modified_base 88: mod_base = OTHER; note = 2'-O-methyl ribonucleotide
  modified_base 89: mod_base = OTHER; note = 2'-O-methyl ribonucleotide
  modified_base 90: mod_base = OTHER; note = 2'-O-methyl ribonucleotide
  modified_base 91: mod_base = OTHER; note = 2'-O-methyl ribonucleotide
  modified_base 92: mod_base = OTHER; note = 2'-O-methyl ribonucleotide
  modified_base 93: mod_base = OTHER; note = 2'-O-methyl ribonucleotide
  modified_base 94: mod_base = OTHER; note = 2'-O-methyl ribonucleotide
  modified_base 95: mod_base = OTHER; note = 2'-O-methyl ribonucleotide
  modified_base 96: mod_base = OTHER; note = 2'-O-methyl ribonucleotide
  modified_base 97: mod_base = OTHER; note = 2'-O-methyl ribonucleotide
  modified_base 98: mod_base = OTHER; note = 2'-O-methyl ribonucleotide
  modified_base 99: mod_base = OTHER; note = 2'-O-methyl ribonucleotide
  modified_base 100: mod_base = OTHER; note = 2'-O-methyl ribonucleotide
  modified_base 101: mod_base = OTHER; note = uniform ribonucleotides (A, C, G, inosine or U), deoxynucleotides (A, G, C, inosine or T), ribonebularine, 2'-O-methylnebularine or deoxynebularine
  modified_base 102: mod_base = OTHER; note = uniform ribonucleotides (A, C, G, inosine or U), deoxynucleotides (A, G, C, inosine or T), ribonebularine, 2'-O-methylnebularine or deoxynebularine
  modified_base 103: mod_base = OTHER; note = uniform ribonucleotides (A, C, G, inosine or U), deoxynucleotides (A, G, C, inosine or T), ribonebularine, 2'-O-methylnebularine or deoxynebularine
  modified_base 1..3: mod_base = OTHER; note = phosphorothioate linkage
  modified_base 45..46: mod_base = OTHER; note = phosphorothioate linkage
  modified_base 98..100: mod_base = OTHER; note = phosphorothioate linkage
  misc_feature 1..100: note = RNA
  misc_feature 101..103: note = Optionally DNA or RNA

SEQ ID NO: 3086 - DNA, 103 bp, synthetic construct; identical to SEQ ID NO: 1795
  source 1..103: mol_type = other DNA
  modified_base 1: mod_base = OTHER; note = 2'-O-methyl ribonucleotide
  modified_base 2: mod_base = OTHER; note = 2'-O-methyl ribonucleotide
  modified_base 3: mod_base = OTHER; note = 2'-O-methyl ribonucleotide
  modified_base 21: mod_base = OTHER; note = 2'-O-methyl ribonucleotide
  modified_base 28: mod_base = OTHER; note = 2'-O-methyl ribonucleotide
  modified_base 29: mod_base = OTHER; note = 2'-O-methyl ribonucleotide
  modified_base 30: mod_base = OTHER; note = 2'-O-methyl ribonucleotide
  modified_base 31: mod_base = OTHER; note = 2'-O-methyl ribonucleotide
  modified_base 32: mod_base = OTHER; note = 2'-O-methyl ribonucleotide
  modified_base 34: mod_base = OTHER; note = 2'-O-methyl ribonucleotide
  modified_base 35: mod_base = OTHER; note = 2'-O-methyl ribonucleotide
  modified_base 36: mod_base = OTHER; note = 2'-O-methyl ribonucleotide
  modified_base 37: mod_base = OTHER; note = 2'-O-methyl ribonucleotide
  modified_base 38: mod_base = OTHER; note = 2'-O-methyl ribonucleotide
  modified_base 39: mod_base = OTHER; note = 2'-O-methyl ribonucleotide
  modified_base 40: mod_base = OTHER; note = 2'-O-methyl ribonucleotide
  modified_base 41: mod_base = OTHER; note = 2'-O-methyl ribonucleotide
  modified_base 42: mod_base = OTHER; note = 2'-O-methyl ribonucleotide
  modified_base 46: mod_base = OTHER; note = 2'-O-methyl ribonucleotide
  modified_base 48: mod_base = OTHER; note = 2'-O-methyl ribonucleotide
  modified_base 50: mod_base = OTHER; note = 2'-O-methyl ribonucleotide
  modified_base 52: mod_base = OTHER; note = 2'-O-methyl ribonucleotide
  modified_base 53: mod_base = OTHER; note = 2'-O-methyl ribonucleotide
  modified_base 54: mod_base = OTHER; note = 2'-O-methyl ribonucleotide
  modified_base 55: mod_base = OTHER; note = 2'-O-methyl ribonucleotide
  modified_base 56: mod_base = OTHER; note = 2'-O-methyl ribonucleotide
  modified_base 57: mod_base = OTHER; note = 2'-O-methyl ribonucleotide
  modified_base 60: mod_base = OTHER; note = 2'-O-methyl ribonucleotide
  modified_base 61: mod_base = OTHER; note = 2'-O-methyl ribonucleotide
  modified_base 66: mod_base = OTHER; note = 2'-O-methyl ribonucleotide
  modified_base 67: mod_base = OTHER; note = 2'-O-methyl ribonucleotide
  modified_base 70: mod_base = OTHER; note = 2'-O-methyl ribonucleotide
  modified_base 71: mod_base = OTHER; note = 2'-O-methyl ribonucleotide
  modified_base 72: mod_base = OTHER; note = 2'-O-methyl ribonucleotide
  modified_base 74: mod_base = OTHER; note = 2'-O-methyl ribonucleotide
  modified_base 75: mod_base = OTHER; note = 2'-O-methyl ribonucleotide
  modified_base 76: mod_base = OTHER; note = 2'-O-methyl ribonucleotide
  modified_base 77: mod_base = OTHER; note = 2'-O-methyl ribonucleotide
  modified_base 78: mod_base = OTHER; note = 2'-O-methyl ribonucleotide
  modified_base 79: mod_base = OTHER; note = 2'-O-methyl ribonucleotide
  modified_base 80: mod_base = OTHER; note = 2'-O-methyl ribonucleotide
  modified_base 81: mod_base = OTHER; note = 2'-O-methyl ribonucleotide
  modified_base 83: mod_base = OTHER; note = 2'-O-methyl ribonucleotide
  modified_base 84: mod_base = OTHER; note = 2'-O-methyl ribonucleotide
  modified_base 85: mod_base = OTHER; note = 2'-O-methyl ribonucleotide
  modified_base 86: mod_base = OTHER; note = 2'-O-methyl ribonucleotide
  modified_base 87: mod_base = OTHER; note = 2'-O-methyl ribonucleotide
  modified_base 88: mod_base = OTHER; note = 2'-O-methyl ribonucleotide
  modified_base 89: mod_base = OTHER; note = 2'-O-methyl ribonucleotide
  modified_base 90: mod_base = OTHER; note = 2'-O-methyl ribonucleotide
  modified_base 91: mod_base = OTHER; note = 2'-O-methyl ribonucleotide
  modified_base 92: mod_base = OTHER; note = 2'-O-methyl ribonucleotide
  modified_base 93: mod_base = OTHER; note = 2'-O-methyl ribonucleotide
  modified_base 94: mod_base = OTHER; note = 2'-O-methyl ribonucleotide
  modified_base 95: mod_base = OTHER; note = 2'-O-methyl ribonucleotide
  modified_base 96: mod_base = OTHER; note = 2'-O-methyl ribonucleotide
  modified_base 97: mod_base = OTHER; note = 2'-O-methyl ribonucleotide
  modified_base 98: mod_base = OTHER; note = 2'-O-methyl ribonucleotide
  modified_base 99: mod_base = OTHER; note = 2'-O-methyl ribonucleotide
  modified_base 100: mod_base = OTHER; note = 2'-O-methyl ribonucleotide
  modified_base 101: mod_base = OTHER; note = uniform ribonucleotides (A, C, G, inosine or U), deoxynucleotides (A, G, C, inosine or T), ribonebularine, 2'-O-methylnebularine or deoxynebularine
  modified_base 102: mod_base = OTHER; note = uniform ribonucleotides (A, C, G, inosine or U), deoxynucleotides (A, G, C, inosine or T), ribonebularine, 2'-O-methylnebularine or deoxynebularine
  modified_base 103: mod_base = OTHER; note = uniform ribonucleotides (A, C, G, inosine or U), deoxynucleotides (A, G, C, inosine or T), ribonebularine, 2'-O-methylnebularine or deoxynebularine
  modified_base 1..3: mod_base = OTHER; note = phosphorothioate linkage
  modified_base 45..46: mod_base = OTHER; note = phosphorothioate linkage
  modified_base 98..100: mod_base = OTHER; note = phosphorothioate linkage
  misc_feature 1..100: note = RNA
  misc_feature 101..103: note = Optionally DNA or RNA

SEQ ID NO: 3087 - DNA, 103 bp, synthetic construct; identical to SEQ ID NO: 1796
  source 1..103: mol_type = other DNA
  modified_base 1: mod_base = OTHER; note = 2'-O-methyl ribonucleotide
  modified_base 2: mod_base = OTHER; note = 2'-O-methyl ribonucleotide
  modified_base 3: mod_base = OTHER; note = 2'-O-methyl ribonucleotide
  modified_base 21: mod_base = OTHER; note = 2'-O-methyl ribonucleotide
  modified_base 28: mod_base = OTHER; note = 2'-O-methyl ribonucleotide
  modified_base 29: mod_base = OTHER; note = 2'-O-methyl ribonucleotide
  modified_base 30: mod_base = OTHER; note = 2'-O-methyl ribonucleotide
  modified_base 31: mod_base = OTHER; note = 2'-O-methyl ribonucleotide
  modified_base 32: mod_base = OTHER; note = 2'-O-methyl ribonucleotide
  modified_base 33: mod_base = OTHER; note = 2'-O-methyl ribonucleotide
  modified_base 34: mod_base = OTHER; note = 2'-O-methyl ribonucleotide
  modified_base 35: mod_base = OTHER; note = 2'-O-methyl ribonucleotide
  modified_base 36: mod_base = OTHER; note = 2'-O-methyl ribonucleotide
  modified_base 37: mod_base = OTHER; note = 2'-O-methyl ribonucleotide
  modified_base 38: mod_base = OTHER; note = 2'-O-methyl ribonucleotide
  modified_base 39: mod_base = OTHER; note = 2'-O-methyl ribonucleotide
  modified_base 40: mod_base = OTHER; note = 2'-O-methyl ribonucleotide
  modified_base 41: mod_base = OTHER; note = 2'-O-methyl ribonucleotide
  modified_base 42: mod_base = OTHER; note = 2'-O-methyl ribonucleotide
  modified_base 46: mod_base = OTHER; note = 2'-O-methyl ribonucleotide
  modified_base 48: mod_base = OTHER; note = 2'-O-methyl ribonucleotide
  modified_base 50: mod_base = OTHER; note = 2'-O-methyl ribonucleotide
  modified_base 52: mod_base = OTHER; note = 2'-O-methyl ribonucleotide
  modified_base 53: mod_base = OTHER; note = 2'-O-methyl ribonucleotide
  modified_base 54: mod_base = OTHER; note = 2'-O-methyl ribonucleotide
  modified_base 55: mod_base = OTHER; note = 2'-O-methyl ribonucleotide
  modified_base 56: mod_base = OTHER; note = 2'-O-methyl ribonucleotide
  modified_base 57: mod_base = OTHER; note = 2'-O-methyl ribonucleotide
  modified_base 60: mod_base = OTHER; note = 2'-O-methyl ribonucleotide
  modified_base 61: mod_base = OTHER; note = 2'-O-methyl ribonucleotide
  modified_base 66: mod_base = OTHER; note = 2'-O-methyl ribonucleotide
  modified_base 67: mod_base = OTHER; note = 2'-O-methyl ribonucleotide
  modified_base 70: mod_base = OTHER; note = 2'-O-methyl ribonucleotide
  modified_base 71: mod_base = OTHER; note = 2'-O-methyl ribonucleotide
  modified_base 72: mod_base = OTHER; note = 2'-O-methyl ribonucleotide
  modified_base 73: mod_base = OTHER; note = 2'-O-methyl ribonucleotide
  modified_base 74: mod_base = OTHER; note = 2'-O-methyl ribonucleotide
  modified_base 75: mod_base = OTHER; note = 2'-O-methyl ribonucleotide
  modified_base 76: mod_base = OTHER; note = 2'-O-methyl ribonucleotide
  modified_base 77: mod_base = OTHER; note = 2'-O-methyl ribonucleotide
  modified_base 78: mod_base = OTHER; note = 2'-O-methyl ribonucleotide
  modified_base 79: mod_base = OTHER; note = 2'-O-methyl ribonucleotide
  modified_base 80: mod_base = OTHER; note = 2'-O-methyl ribonucleotide
  modified_base 81: mod_base = OTHER; note = 2'-O-methyl ribonucleotide
  modified_base 83: mod_base = OTHER; note = 2'-O-methyl ribonucleotide
  modified_base 84: mod_base = OTHER; note = 2'-O-methyl ribonucleotide
  modified_base 85: mod_base = OTHER; note = 2'-O-methyl ribonucleotide
  modified_base 86: mod_base = OTHER; note = 2'-O-methyl ribonucleotide
  modified_base 87: mod_base = OTHER; note = 2'-O-methyl ribonucleotide
  modified_base 88: mod_base = OTHER; note = 2'-O-methyl ribonucleotide
  modified_base 89: mod_base = OTHER; note = 2'-O-methyl ribonucleotide
  modified_base 90: mod_base = OTHER; note = 2'-O-methyl ribonucleotide
  modified_base 91: mod_base = OTHER; note = 2'-O-methyl ribonucleotide
  modified_base 92: mod_base = OTHER; note = 2'-O-methyl ribonucleotide
  modified_base 93: mod_base = OTHER; note = 2'-O-methyl ribonucleotide
  modified_base 94: mod_base = OTHER; note = 2'-O-methyl ribonucleotide
  modified_base 95: mod_base = OTHER; note = 2'-O-methyl ribonucleotide
  modified_base 96: mod_base = OTHER; note = 2'-O-methyl ribonucleotide
  modified_base 97: mod_base = OTHER; note = 2'-O-methyl ribonucleotide
  modified_base 98: mod_base = OTHER; note = 2'-O-methyl ribonucleotide
  modified_base 99: mod_base = OTHER; note = 2'-O-methyl ribonucleotide
  modified_base 100: mod_base = OTHER; note = 2'-O-methyl ribonucleotide
  modified_base 101: mod_base = OTHER; note = uniform ribonucleotides (A, C, G, inosine or U), deoxynucleotides (A, G, C, inosine or T), ribonebularine, 2'-O-methylnebularine or deoxynebularine
  modified_base 102: mod_base = OTHER; note = uniform ribonucleotides (A, C, G, inosine or U), deoxynucleotides (A, G, C, inosine or T), ribonebularine, 2'-O-methylnebularine or deoxynebularine
  modified_base 103: mod_base = OTHER; note = uniform ribonucleotides (A, C, G, inosine or U), deoxynucleotides (A, G, C, inosine or T), ribonebularine, 2'-O-methylnebularine or deoxynebularine
  modified_base 1..3: mod_base = OTHER; note = phosphorothioate linkage
  modified_base 45..46: mod_base = OTHER; note = phosphorothioate linkage
  modified_base 98..100: mod_base = OTHER; note = phosphorothioate linkage
  misc_feature 1..100: note = RNA
  misc_feature 101..103: note = Optionally DNA or RNA

SEQ ID NO: 3088 - DNA, 103 bp, synthetic construct; identical to SEQ ID NO: 1796
  source 1..103: mol_type = other DNA
  modified_base 1: mod_base = OTHER; note = 2'-O-methyl ribonucleotide
  modified_base 2: mod_base = OTHER; note = 2'-O-methyl ribonucleotide
  modified_base 3: mod_base = OTHER; note = 2'-O-methyl ribonucleotide
  modified_base 21: mod_base = OTHER; note = 2'-O-methyl ribonucleotide
  modified_base 28: mod_base = OTHER; note = 2'-O-methyl ribonucleotide
  modified_base 29: mod_base = OTHER; note = 2'-O-methyl ribonucleotide
  modified_base 30: mod_base = OTHER; note = 2'-O-methyl ribonucleotide
  modified_base 31: mod_base = OTHER; note = 2'-O-methyl ribonucleotide
  modified_base 32: mod_base = OTHER; note = 2'-O-methyl ribonucleotide
  modified_base 34: mod_base = OTHER; note = 2'-O-methyl ribonucleotide
  modified_base 35: mod_base = OTHER; note = 2'-O-methyl ribonucleotide
  modified_base 36: mod_base = OTHER; note = 2'-O-methyl ribonucleotide
  modified_base 37: mod_base = OTHER; note = 2'-O-methyl ribonucleotide
  modified_base 38: mod_base = OTHER; note = 2'-O-methyl ribonucleotide
  modified_base 39: mod_base = OTHER; note = 2'-O-methyl ribonucleotide
  modified_base 40: mod_base = OTHER; note = 2'-O-methyl ribonucleotide
  modified_base 41: mod_base = OTHER; note = 2'-O-methyl ribonucleotide
  modified_base 42: mod_base = OTHER; note = 2'-O-methyl ribonucleotide
  modified_base 46: mod_base = OTHER; note = 2'-O-methyl ribonucleotide
  modified_base 48: mod_base = OTHER; note = 2'-O-methyl ribonucleotide
  modified_base 50: mod_base = OTHER; note = 2'-O-methyl ribonucleotide
  modified_base 52: mod_base = OTHER; note = 2'-O-methyl ribonucleotide
  modified_base 53: mod_base = OTHER; note = 2'-O-methyl ribonucleotide
  modified_base 54: mod_base = OTHER; note = 2'-O-methyl ribonucleotide
  modified_base 55: mod_base = OTHER; note = 2'-O-methyl ribonucleotide
  modified_base 56: mod_base = OTHER; note = 2'-O-methyl ribonucleotide
  modified_base 57: mod_base = OTHER; note = 2'-O-methyl ribonucleotide
  modified_base 60: mod_base = OTHER; note = 2'-O-methyl ribonucleotide
  modified_base 61: mod_base = OTHER; note = 2'-O-methyl ribonucleotide
  modified_base 66: mod_base = OTHER; note = 2'-O-methyl ribonucleotide
  modified_base 67: mod_base = OTHER; note = 2'-O-methyl ribonucleotide
  modified_base 70: mod_base = OTHER; note = 2'-O-methyl ribonucleotide
  modified_base 71: mod_base = OTHER; note = 2'-O-methyl ribonucleotide
  modified_base 72: mod_base = OTHER; note = 2'-O-methyl ribonucleotide
  modified_base 74: mod_base = OTHER; note = 2'-O-methyl ribonucleotide
  modified_base 75: mod_base = OTHER; note = 2'-O-methyl ribonucleotide
  modified_base 76: mod_base = OTHER; note = 2'-O-methyl ribonucleotide
  modified_base 77: mod_base = OTHER; note = 2'-O-methyl ribonucleotide
  modified_base 78: mod_base = OTHER; note = 2'-O-methyl ribonucleotide
  modified_base 79: mod_base = OTHER; note = 2'-O-methyl ribonucleotide
  modified_base 80: mod_base = OTHER; note = 2'-O-methyl ribonucleotide
  modified_base 81: mod_base = OTHER; note = 2'-O-methyl ribonucleotide
  modified_base 83: mod_base = OTHER; note = 2'-O-methyl ribonucleotide
  modified_base 84: mod_base = OTHER; note = 2'-O-methyl ribonucleotide
  modified_base 85: mod_base = OTHER; note = 2'-O-methyl ribonucleotide
  modified_base 86: mod_base = OTHER; note = 2'-O-methyl ribonucleotide
  modified_base 87: mod_base = OTHER; note = 2'-O-methyl ribonucleotide
  modified_base 88: mod_base = OTHER; note = 2'-O-methyl ribonucleotide
  modified_base 89: mod_base = OTHER; note = 2'-O-methyl ribonucleotide
  modified_base 90: mod_base = OTHER; note = 2'-O-methyl ribonucleotide
  modified_base 91: mod_base = OTHER; note = 2'-O-methyl ribonucleotide
  modified_base 92: mod_base = OTHER; note = 2'-O-methyl ribonucleotide
  modified_base 93: mod_base = OTHER; note = 2'-O-methyl ribonucleotide
  modified_base 94: mod_base = OTHER; note = 2'-O-methyl ribonucleotide
  modified_base 95: mod_base = OTHER; note = 2'-O-methyl ribonucleotide
  modified_base 96: mod_base = OTHER; note = 2'-O-methyl ribonucleotide
  modified_base 97: mod_base = OTHER; note = 2'-O-methyl ribonucleotide
  modified_base 98: mod_base = OTHER; note = 2'-O-methyl ribonucleotide
  modified_base 99: mod_base = OTHER; note = 2'-O-methyl ribonucleotide
  modified_base 100: mod_base = OTHER; note = 2'-O-methyl ribonucleotide
  modified_base 101: mod_base = OTHER; note = uniform ribonucleotides (A, C, G, inosine or U), deoxynucleotides (A, G, C, inosine or T), ribonebularine, 2'-O-methylnebularine or deoxynebularine
  modified_base 102: mod_base = OTHER; note = uniform ribonucleotides (A, C, G, inosine or U), deoxynucleotides (A, G, C, inosine or T), ribonebularine, 2'-O-methylnebularine or deoxynebularine
  modified_base 103: mod_base = OTHER; note = uniform ribonucleotides (A, C, G, inosine or U), deoxynucleotides (A, G, C, inosine or T), ribonebularine, 2'-O-methylnebularine or deoxynebularine
  modified_base 1..3: mod_base = OTHER; note = phosphorothioate linkage
  modified_base 45..46: mod_base = OTHER; note = phosphorothioate linkage
  modified_base 98..100: mod_base = OTHER; note = phosphorothioate linkage
  misc_feature 1..100: note = RNA
  misc_feature 101..103: note = Optionally DNA or RNA

SEQ ID NO: 3089 - DNA, 103 bp, synthetic construct; identical to SEQ ID NO: 1797
  source 1..103: mol_type = other DNA
  modified_base 1: mod_base = OTHER; note = 2'-O-methyl ribonucleotide
  modified_base 2: mod_base = OTHER; note = 2'-O-methyl ribonucleotide
  modified_base 3: mod_base = OTHER; note = 2'-O-methyl ribonucleotide
  modified_base 21: mod_base = OTHER; note = 2'-O-methyl ribonucleotide
  modified_base 28: mod_base = OTHER; note = 2'-O-methyl ribonucleotide
  modified_base 29: mod_base = OTHER; note = 2'-O-methyl ribonucleotide
  modified_base 30: mod_base = OTHER; note = 2'-O-methyl ribonucleotide
  modified_base 31: mod_base = OTHER; note = 2'-O-methyl ribonucleotide
  modified_base 32: mod_base = OTHER; note = 2'-O-methyl ribonucleotide
  modified_base 33: mod_base = OTHER; note = 2'-O-methyl ribonucleotide
  modified_base 34: mod_base = OTHER; note = 2'-O-methyl ribonucleotide
  modified_base 35: mod_base = OTHER; note = 2'-O-methyl ribonucleotide
  modified_base 36: mod_base = OTHER; note = 2'-O-methyl ribonucleotide
  modified_base 37: mod_base = OTHER; note = 2'-O-methyl ribonucleotide
  modified_base 38: mod_base = OTHER; note = 2'-O-methyl ribonucleotide
  modified_base 39: mod_base = OTHER; note = 2'-O-methyl ribonucleotide
  modified_base 40: mod_base = OTHER; note = 2'-O-methyl ribonucleotide
  modified_base 41: mod_base = OTHER; note = 2'-O-methyl ribonucleotide
  modified_base 42: mod_base = OTHER; note = 2'-O-methyl ribonucleotide
  modified_base 46: mod_base = OTHER; note = 2'-O-methyl ribonucleotide
  modified_base 48: mod_base = OTHER; note = 2'-O-methyl ribonucleotide
  modified_base 50: mod_base = OTHER; note = 2'-O-methyl ribonucleotide
  modified_base 52: mod_base = OTHER; note = 2'-O-methyl ribonucleotide
  modified_base 53: mod_base = OTHER; note = 2'-O-methyl ribonucleotide
  modified_base 54: mod_base = OTHER; note = 2'-O-methyl ribonucleotide
  modified_base 57: mod_base = OTHER; note = 2'-O-methyl ribonucleotide
  modified_base 61: mod_base = OTHER; note = 2'-O-methyl ribonucleotide
  modified_base 66: mod_base = OTHER; note = 2'-O-methyl ribonucleotide
  modified_base 67: mod_base = OTHER; note = 2'-O-methyl ribonucleotide
  modified_base 70: mod_base = OTHER; note = 2'-O-methyl ribonucleotide
  modified_base 71: mod_base = OTHER; note = 2'-O-methyl ribonucleotide
  modified_base 72: mod_base = OTHER; note = 2'-O-methyl ribonucleotide
  modified_base 74: mod_base = OTHER; note = 2'-O-methyl ribonucleotide
  modified_base 75: mod_base = OTHER; note = 2'-O-methyl ribonucleotide
  modified_base 76: mod_base = OTHER; note = 2'-O-methyl ribonucleotide
  modified_base 77: mod_base = OTHER; note = 2'-O-methyl ribonucleotide
  modified_base 78: mod_base = OTHER; note = 2'-O-methyl ribonucleotide
  modified_base 79: mod_base = OTHER; note = 2'-O-methyl ribonucleotide
  modified_base 80: mod_base = OTHER; note = 2'-O-methyl ribonucleotide
  modified_base 82: mod_base = OTHER; note = 2'-O-methyl ribonucleotide
  modified_base 83: mod_base = OTHER; note = 2'-O-methyl ribonucleotide
  modified_base 84: mod_base = OTHER; note = 2'-O-methyl ribonucleotide
  modified_base 85: mod_base = OTHER; note = 2'-O-methyl ribonucleotide
  modified_base 86: mod_base = OTHER; note = 2'-O-methyl ribonucleotide
  modified_base 87: mod_base = OTHER; note = 2'-O-methyl ribonucleotide
  modified_base 89: mod_base = OTHER; note = 2'-O-methyl ribonucleotide
  modified_base 92: mod_base = OTHER; note = 2'-O-methyl ribonucleotide
  modified_base 93: mod_base = OTHER; note = 2'-O-methyl ribonucleotide
  modified_base 94: mod_base = OTHER; note = 2'-O-methyl ribonucleotide
  modified_base 95: mod_base = OTHER; note = 2'-O-methyl ribonucleotide
  modified_base 96: mod_base = OTHER; note = 2'-O-methyl ribonucleotide
  modified_base 97: mod_base = OTHER; note = 2'-O-methyl ribonucleotide
  modified_base 98: mod_base = OTHER; note = 2'-O-methyl ribonucleotide
  modified_base 99: mod_base = OTHER; note = 2'-O-methyl ribonucleotide
  modified_base 100: mod_base = OTHER; note = 2'-O-methyl ribonucleotide
  modified_base 101: mod_base = OTHER; note = uniform ribonucleotides (A, C, G, inosine or U), deoxynucleotides (A, G, C, inosine or T), ribonebularine, 2'-O-methylnebularine or deoxynebularine
  modified_base 102: mod_base = OTHER; note = uniform ribonucleotides (A, C, G, inosine or U), deoxynucleotides (A, G, C, inosine or T), ribonebularine, 2'-O-methylnebularine or deoxynebularine
  modified_base 103: mod_base = OTHER; note = uniform ribonucleotides (A, C, G, inosine or U), deoxynucleotides (A, G, C, inosine or T), ribonebularine, 2'-O-methylnebularine or deoxynebularine
  modified_base 1..3: mod_base = OTHER; note = phosphorothioate linkage
  modified_base 45..46: mod_base = OTHER; note = phosphorothioate linkage
  modified_base 98..100: mod_base = OTHER; note = phosphorothioate linkage
  misc_feature 1..100: note = RNA
  misc_feature 101..103: note = Optionally DNA or RNA

SEQ ID NO: 3090 - DNA, 103 bp, synthetic construct; identical to SEQ ID NO: 1797
  source 1..103: mol_type = other DNA
  modified_base 1: mod_base = OTHER; note = 2'-O-methyl ribonucleotide
  modified_base 2: mod_base = OTHER; note = 2'-O-methyl ribonucleotide
  modified_base 3: mod_base = OTHER; note = 2'-O-methyl ribonucleotide
  modified_base 21: mod_base = OTHER; note = 2'-O-methyl ribonucleotide
  modified_base 28: mod_base = OTHER; note = 2'-O-methyl ribonucleotide
  modified_base 29: mod_base = OTHER; note = 2'-O-methyl ribonucleotide
  modified_base 30: mod_base = OTHER; note = 2'-O-methyl ribonucleotide
  modified_base 31: mod_base = OTHER; note = 2'-O-methyl ribonucleotide
  modified_base 32: mod_base = OTHER; note = 2'-O-methyl ribonucleotide
  modified_base 33: mod_base = OTHER; note = 2'-O-methyl ribonucleotide
  modified_base 34: mod_base = OTHER; note = 2'-O-methyl ribonucleotide
  modified_base 35: mod_base = OTHER; note = 2'-O-methyl ribonucleotide
  modified_base 36: mod_base = OTHER; note = 2'-O-methyl ribonucleotide
  modified_base 37: mod_base = OTHER; note = 2'-O-methyl ribonucleotide
  modified_base 38: mod_base = OTHER; note = 2'-O-methyl ribonucleotide
  modified_base 39: mod_base = OTHER; note = 2'-O-methyl ribonucleotide
  modified_base 40: mod_base = OTHER; note = 2'-O-methyl ribonucleotide
  modified_base 41: mod_base = OTHER; note = 2'-O-methyl ribonucleotide
  modified_base 42: mod_base = OTHER; note = 2'-O-methyl ribonucleotide
  modified_base 46: mod_base = OTHER; note = 2'-O-methyl ribonucleotide
  modified_base 48: mod_base = OTHER; note = 2'-O-methyl ribonucleotide
  modified_base 50: mod_base = OTHER; note = 2'-O-methyl ribonucleotide
  modified_base 52: mod_base = OTHER; note = 2'-O-methyl ribonucleotide
  modified_base 53: mod_base = OTHER; note = 2'-O-methyl ribonucleotide
  modified_base 54: mod_base = OTHER; note = 2'-O-methyl ribonucleotide
  modified_base 55: mod_base = OTHER; note = 2'-O-methyl ribonucleotide
  modified_base 56: mod_base = OTHER; note = 2'-O-methyl ribonucleotide
  modified_base 57: mod_base = OTHER; note = 2'-O-methyl ribonucleotide
  modified_base 60: mod_base = OTHER; note = 2'-O-methyl ribonucleotide
  modified_base 61: mod_base = OTHER; note = 2'-O-methyl ribonucleotide
  modified_base 66: mod_base = OTHER; note = 2'-O-methyl ribonucleotide
  modified_base 67: mod_base = OTHER; note = 2'-O-methyl ribonucleotide
  modified_base 70: mod_base = OTHER; note = 2'-O-methyl ribonucleotide
  modified_base 71: mod_base = OTHER; note = 2'-O-methyl ribonucleotide
  modified_base 72: mod_base = OTHER; note = 2'-O-methyl ribonucleotide
  modified_base 74: mod_base = OTHER; note = 2'-O-methyl ribonucleotide
  modified_base 75: mod_base = OTHER; note = 2'-O-methyl ribonucleotide
  modified_base 76: mod_base = OTHER; note = 2'-O-methyl ribonucleotide
  modified_base 77: mod_base = OTHER; note = 2'-O-methyl ribonucleotide
  modified_base 78: mod_base = OTHER; note = 2'-O-methyl ribonucleotide
  modified_base 79: mod_base = OTHER; note = 2'-O-methyl ribonucleotide
  modified_base 80: mod_base = OTHER; note = 2'-O-methyl ribonucleotide
  modified_base 82: mod_base = OTHER; note = 2'-O-methyl ribonucleotide
  modified_base 83: mod_base = OTHER; note = 2'-O-methyl ribonucleotide
  modified_base 84: mod_base = OTHER; note = 2'-O-methyl ribonucleotide
  modified_base 85: mod_base = OTHER; note = 2'-O-methyl ribonucleotide
  modified_base 86: mod_base = OTHER; note = 2'-O-methyl ribonucleotide
  modified_base 87: mod_base = OTHER; note = 2'-O-methyl ribonucleotide
  modified_base 89: mod_base = OTHER; note = 2'-O-methyl ribonucleotide
  modified_base 92: mod_base = OTHER; note = 2'-O-methyl ribonucleotide
  modified_base 93: mod_base = OTHER; note = 2'-O-methyl ribonucleotide
  modified_base 94: mod_base = OTHER; note = 2'-O-methyl ribonucleotide
  modified_base 95: mod_base = OTHER; note = 2'-O-methyl ribonucleotide
  modified_base 96: mod_base = OTHER; note = 2'-O-methyl ribonucleotide
  modified_base 97: mod_base = OTHER; note = 2'-O-methyl ribonucleotide
  modified_base 98: mod_base = OTHER; note = 2'-O-methyl ribonucleotide
  modified_base 99: mod_base = OTHER; note = 2'-O-methyl ribonucleotide
  modified_base 100: mod_base = OTHER; note = 2'-O-methyl ribonucleotide
  modified_base 101: mod_base = OTHER; note = uniform ribonucleotides (A, C, G, inosine or U), deoxynucleotides (A, G, C, inosine or T), ribonebularine, 2'-O-methylnebularine or deoxynebularine
  modified_base 102: mod_base = OTHER; note = uniform ribonucleotides (A, C, G, inosine or U), deoxynucleotides (A, G, C, inosine or T), ribonebularine, 2'-O-methylnebularine or deoxynebularine
  modified_base 103: mod_base = OTHER; note = uniform ribonucleotides (A, C, G, inosine or U), deoxynucleotides (A, G, C, inosine or T), ribonebularine, 2'-O-methylnebularine or deoxynebularine
  modified_base 1..3: mod_base = OTHER; note = phosphorothioate linkage
  modified_base 45..46: mod_base = OTHER; note = phosphorothioate linkage
  modified_base 98..100: mod_base = OTHER; note = phosphorothioate linkage
  misc_feature 1..100: note = RNA
  misc_feature 101..103: note = Optionally DNA or RNA

SEQ ID NO: 3091 - DNA, 103 bp, synthetic construct; identical to SEQ ID NO: 1797
  source 1..103: mol_type = other DNA
  modified_base 1: mod_base = OTHER; note = 2'-O-methyl ribonucleotide
  modified_base 2: mod_base = OTHER; note = 2'-O-methyl ribonucleotide
  modified_base 3: mod_base = OTHER; note = 2'-O-methyl ribonucleotide
  modified_base 21: mod_base = OTHER; note = 2'-O-methyl ribonucleotide
  modified_base 28: mod_base = OTHER; note = 2'-O-methyl ribonucleotide
  modified_base 29: mod_base = OTHER; note = 2'-O-methyl ribonucleotide
  modified_base 30: mod_base = OTHER; note = 2'-O-methyl ribonucleotide
  modified_base 31: mod_base = OTHER; note = 2'-O-methyl ribonucleotide
  modified_base 32: mod_base = OTHER; note = 2'-O-methyl ribonucleotide
  modified_base 33: mod_base = OTHER; note = 2'-O-methyl ribonucleotide
  modified_base 34: mod_base = OTHER; note = 2'-O-methyl ribonucleotide
  modified_base 35: mod_base = OTHER; note = 2'-O-methyl ribonucleotide
  modified_base 36: mod_base = OTHER; note = 2'-O-methyl ribonucleotide
  modified_base 37: mod_base = OTHER; note = 2'-O-methyl ribonucleotide
  modified_base 38: mod_base = OTHER; note = 2'-O-methyl ribonucleotide
  modified_base 39: mod_base = OTHER; note = 2'-O-methyl ribonucleotide
  modified_base 40: mod_base = OTHER; note = 2'-O-methyl ribonucleotide
  modified_base 41: mod_base = OTHER; note = 2'-O-methyl ribonucleotide
  modified_base 42: mod_base = OTHER; note = 2'-O-methyl ribonucleotide
  modified_base 46: mod_base = OTHER; note = 2'-O-methyl ribonucleotide
  modified_base 48: mod_base = OTHER; note = 2'-O-methyl ribonucleotide
  modified_base 50: mod_base = OTHER; note = 2'-O-methyl ribonucleotide
  modified_base 52: mod_base = OTHER; note = 2'-O-methyl ribonucleotide
  modified_base 53: mod_base = OTHER; note = 2'-O-methyl ribonucleotide
  modified_base 54: mod_base = OTHER; note = 2'-O-methyl ribonucleotide
  modified_base 57: mod_base = OTHER; note = 2'-O-methyl ribonucleotide
  modified_base 61: mod_base = OTHER; note = 2'-O-methyl ribonucleotide
  modified_base 66: mod_base = OTHER; note = 2'-O-methyl ribonucleotide
  modified_base 67: mod_base = OTHER; note = 2'-O-methyl ribonucleotide
  modified_base 70: mod_base = OTHER; note = 2'-O-methyl ribonucleotide
  modified_base 71: mod_base = OTHER; note = 2'-O-methyl ribonucleotide
  modified_base 72: mod_base = OTHER; note = 2'-O-methyl ribonucleotide
  modified_base 73: mod_base = OTHER; note = 2'-O-methyl ribonucleotide
  modified_base 74: mod_base = OTHER; note = 2'-O-methyl ribonucleotide
  modified_base 75: mod_base = OTHER; note = 2'-O-methyl ribonucleotide
  modified_base 76: mod_base = OTHER; note = 2'-O-methyl ribonucleotide
  modified_base 77: mod_base = OTHER; note = 2'-O-methyl ribonucleotide
  modified_base 78: mod_base = OTHER; note = 2'-O-methyl ribonucleotide
  modified_base 79: mod_base = OTHER; note = 2'-O-methyl ribonucleotide
  modified_base 80: mod_base = OTHER; note = 2'-O-methyl ribonucleotide
  modified_base 82: mod_base = OTHER; note = 2'-O-methyl ribonucleotide
  modified_base 83: mod_base = OTHER; note = 2'-O-methyl ribonucleotide
  modified_base 84: mod_base = OTHER; note = 2'-O-methyl ribonucleotide
  modified_base 85: mod_base = OTHER; note = 2'-O-methyl ribonucleotide
  modified_base 86: mod_base = OTHER; note = 2'-O-methyl ribonucleotide
  modified_base 87: mod_base = OTHER; note = 2'-O-methyl ribonucleotide
  modified_base 89: mod_base = OTHER; note = 2'-O-methyl ribonucleotide
  modified_base 91: mod_base = OTHER; note = 2'-O-methyl ribonucleotide
  modified_base 92: mod_base = OTHER; note = 2'-O-methyl ribonucleotide
  modified_base 93: mod_base = OTHER; note = 2'-O-methyl ribonucleotide
  modified_base 94: mod_base = OTHER; note = 2'-O-methyl ribonucleotide
  modified_base 95: mod_base = OTHER; note = 2'-O-methyl ribonucleotide
  modified_base 96: mod_base = OTHER; note = 2'-O-methyl ribonucleotide
  modified_base 97: mod_base = OTHER; note = 2'-O-methyl ribonucleotide
  modified_base 98: mod_base = OTHER; note = 2'-O-methyl ribonucleotide
  modified_base 99: mod_base = OTHER; note = 2'-O-methyl ribonucleotide
  modified_base 100: mod_base = OTHER; note = 2'-O-methyl ribonucleotide
  modified_base 101: mod_base = OTHER; note = uniform ribonucleotides (A, C, G, inosine or U), deoxynucleotides (A, G, C, inosine or T), ribonebularine, 2'-O-methylnebularine or deoxynebularine
  modified_base 102: mod_base = OTHER; note = uniform ribonucleotides (A, C, G, inosine or U), deoxynucleotides (A, G, C, inosine or T), ribonebularine, 2'-O-methylnebularine or deoxynebularine
  modified_base 103: mod_base = OTHER; note = uniform ribonucleotides (A, C, G, inosine or U), deoxynucleotides (A, G, C, inosine or T), ribonebularine, 2'-O-methylnebularine or deoxynebularine
  modified_base 1..3: mod_base = OTHER; note = phosphorothioate linkage
  modified_base 45..46: mod_base = OTHER; note = phosphorothioate linkage
  modified_base 98..100: mod_base = OTHER; note = phosphorothioate linkage
  misc_feature 1..100: note = RNA
  misc_feature 101..103: note = Optionally DNA or RNA

SEQ ID NO: 3092 - DNA, 103 bp, synthetic construct; identical to SEQ ID NO: 1797
  source 1..103: mol_type = other DNA
  modified_base 1: mod_base = OTHER; note = 2'-O-methyl ribonucleotide
  modified_base 2: mod_base = OTHER; note = 2'-O-methyl ribonucleotide
  modified_base 3: mod_base = OTHER; note = 2'-O-methyl ribonucleotide
  modified_base 21: mod_base = OTHER; note = 2'-O-methyl ribonucleotide
  modified_base 28: mod_base = OTHER; note = 2'-O-methyl ribonucleotide
  modified_base 29: mod_base = OTHER; note = 2'-O-methyl ribonucleotide
  modified_base 30: mod_base = OTHER; note = 2'-O-methyl ribonucleotide
  modified_base 31: mod_base = OTHER; note = 2'-O-methyl ribonucleotide
  modified_base 32: mod_base = OTHER; note = 2'-O-methyl ribonucleotide
  modified_base 34: mod_base = OTHER; note = 2'-O-methyl ribonucleotide
  modified_base 35: mod_base = OTHER; note = 2'-O-methyl ribonucleotide
  modified_base 36: mod_base = OTHER; note = 2'-O-methyl ribonucleotide
  modified_base 37: mod_base = OTHER; note = 2'-O-methyl ribonucleotide
  modified_base 38: mod_base = OTHER; note = 2'-O-methyl ribonucleotide
  modified_base 39: mod_base = OTHER; note = 2'-O-methyl ribonucleotide
  modified_base 40: mod_base = OTHER; note = 2'-O-methyl ribonucleotide
  modified_base 41: mod_base = OTHER; note = 2'-O-methyl ribonucleotide
  modified_base 42: mod_base = OTHER; note = 2'-O-methyl ribonucleotide
  modified_base 46: mod_base = OTHER; note = 2'-O-methyl ribonucleotide
  modified_base 48: mod_base = OTHER; note = 2'-O-methyl ribonucleotide
  modified_base 50: mod_base = OTHER; note = 2'-O-methyl ribonucleotide
  modified_base 52: mod_base = OTHER; note = 2'-O-methyl ribonucleotide
  modified_base 53: mod_base = OTHER; note = 2'-O-methyl ribonucleotide
  modified_base 54: mod_base = OTHER; note = 2'-O-methyl ribonucleotide
  modified_base 57: mod_base = OTHER; note = 2'-O-methyl ribonucleotide
  modified_base 61: mod_base = OTHER; note = 2'-O-methyl ribonucleotide
  modified_base 66: mod_base = OTHER; note = 2'-O-methyl ribonucleotide
  modified_base 67: mod_base = OTHER; note = 2'-O-methyl ribonucleotide
  modified_base 70: mod_base = OTHER; note = 2'-O-methyl ribonucleotide
  modified_base 71: mod_base = OTHER; note = 2'-O-methyl ribonucleotide
  modified_base 72: mod_base = OTHER; note = 2'-O-methyl ribonucleotide
  modified_base 73: mod_base = OTHER; note = 2'-O-methyl ribonucleotide
  modified_base 74: mod_base = OTHER; note = 2'-O-methyl ribonucleotide
  modified_base 75: mod_base = OTHER; note = 2'-O-methyl ribonucleotide
  modified_base 76: mod_base = OTHER; note = 2'-O-methyl ribonucleotide
  modified_base 77: mod_base = OTHER; note = 2'-O-methyl ribonucleotide
  modified_base 78: mod_base = OTHER; note = 2'-O-methyl ribonucleotide
  modified_base 79: mod_base = OTHER; note = 2'-O-methyl ribonucleotide
  modified_base 80: mod_base = OTHER; note = 2'-O-methyl ribonucleotide
  modified_base 82: mod_base = OTHER; note = 2'-O-methyl ribonucleotide
  modified_base 83: mod_base = OTHER; note = 2'-O-methyl ribonucleotide
  modified_base 84: mod_base = OTHER; note = 2'-O-methyl ribonucleotide
  modified_base 85: mod_base = OTHER; note = 2'-O-methyl ribonucleotide
  modified_base 86: mod_base = OTHER; note = 2'-O-methyl ribonucleotide
  modified_base 87: mod_base = OTHER; note = 2'-O-methyl ribonucleotide
  modified_base 89: mod_base = OTHER; note = 2'-O-methyl ribonucleotide
  modified_base 92: mod_base = OTHER; note = 2'-O-methyl ribonucleotide
  modified_base 93: mod_base = OTHER; note = 2'-O-methyl ribonucleotide
  modified_base 94: mod_base = OTHER; note = 2'-O-methyl ribonucleotide
  modified_base 95: mod_base = OTHER; note = 2'-O-methyl ribonucleotide
  modified_base 96: mod_base = OTHER; note = 2'-O-methyl ribonucleotide
  modified_base 97: mod_base = OTHER; note = 2'-O-methyl ribonucleotide
  modified_base 98: mod_base = OTHER; note = 2'-O-methyl ribonucleotide
  modified_base 99: mod_base = OTHER; note = 2'-O-methyl ribonucleotide
  modified_base 100: mod_base = OTHER; note = 2'-O-methyl ribonucleotide
  modified_base 101: mod_base = OTHER; note = uniform ribonucleotides (A, C, G, inosine or U), deoxynucleotides (A, G, C, inosine or T), ribonebularine, 2'-O-methylnebularine or deoxynebularine
  modified_base 102: mod_base = OTHER; note = uniform ribonucleotides (A, C, G, inosine or U), deoxynucleotides (A, G, C, inosine or T), ribonebularine, 2'-O-methylnebularine or deoxynebularine
  modified_base 103: mod_base = OTHER; note = uniform ribonucleotides (A, C, G, inosine or U), deoxynucleotides (A, G, C, inosine or T), ribonebularine, 2'-O-methylnebularine or deoxynebularine
  modified_base 1..3: mod_base = OTHER; note = phosphorothioate linkage
  modified_base 45..46: mod_base = OTHER; note = phosphorothioate linkage
  modified_base 98..100: mod_base = OTHER; note = phosphorothioate linkage
  misc_feature 1..100: note = RNA
  misc_feature 101..103: note = Optionally DNA or RNA

SEQ ID NO: 3093 - DNA, 103 bp, synthetic construct; identical to SEQ ID NO: 1797
  source 1..103: mol_type = other DNA
  modified_base 1: mod_base = OTHER; note = 2'-O-methyl ribonucleotide
  modified_base 2: mod_base = OTHER; note = 2'-O-methyl ribonucleotide
  modified_base 3: mod_base = OTHER; note = 2'-O-methyl ribonucleotide
  modified_base 21: mod_base = OTHER; note = 2'-O-methyl ribonucleotide
  modified_base 28: mod_base = OTHER; note = 2'-O-methyl ribonucleotide
  modified_base 29: mod_base = OTHER; note = 2'-O-methyl ribonucleotide
  modified_base 30: mod_base = OTHER; note = 2'-O-methyl ribonucleotide
  modified_base 31: mod_base = OTHER; note = 2'-O-methyl ribonucleotide
  modified_base 32: mod_base = OTHER; note = 2'-O-methyl ribonucleotide
  modified_base 34: mod_base = OTHER; note = 2'-O-methyl ribonucleotide
  modified_base 35: mod_base = OTHER; note = 2'-O-methyl ribonucleotide
  modified_base 36: mod_base = OTHER; note = 2'-O-methyl ribonucleotide
  modified_base 37: mod_base = OTHER; note = 2'-O-methyl ribonucleotide
  modified_base 38: mod_base = OTHER; note = 2'-O-methyl ribonucleotide
  modified_base 39: mod_base = OTHER; note = 2'-O-methyl ribonucleotide
  modified_base 40: mod_base = OTHER; note = 2'-O-methyl ribonucleotide
  modified_base 41: mod_base = OTHER; note = 2'-O-methyl ribonucleotide
  modified_base 42: mod_base = OTHER; note = 2'-O-methyl ribonucleotide
  modified_base 46: mod_base = OTHER; note = 2'-O-methyl ribonucleotide
  modified_base 48: mod_base = OTHER; note = 2'-O-methyl ribonucleotide
  modified_base 50: mod_base = OTHER; note = 2'-O-methyl ribonucleotide
  modified_base 52: mod_base = OTHER; note = 2'-O-methyl ribonucleotide
  modified_base 53: mod_base = OTHER; note = 2'-O-methyl ribonucleotide
  modified_base 54: mod_base = OTHER; note = 2'-O-methyl ribonucleotide
  modified_base 57: mod_base = OTHER; note = 2'-O-methyl ribonucleotide
  modified_base 61: mod_base = OTHER; note = 2'-O-methyl ribonucleotide
  modified_base 66: mod_base = OTHER; note = 2'-O-methyl ribonucleotide
  modified_base 67: mod_base = OTHER; note = 2'-O-methyl ribonucleotide
  modified_base 70: mod_base = OTHER; note = 2'-O-methyl ribonucleotide
  modified_base 71: mod_base = OTHER; note = 2'-O-methyl ribonucleotide
  modified_base 72: mod_base = OTHER; note = 2'-O-methyl ribonucleotide
  modified_base 73: mod_base = OTHER; note = 2'-O-methyl ribonucleotide
  modified_base 74: mod_base = OTHER; note = 2'-O-methyl ribonucleotide
  modified_base 75: mod_base = OTHER; note = 2'-O-methyl ribonucleotide
  modified_base 76: mod_base = OTHER; note = 2'-O-methyl ribonucleotide
  modified_base 77: mod_base = OTHER; note = 2'-O-methyl ribonucleotide
  modified_base 78: mod_base = OTHER; note = 2'-O-methyl ribonucleotide
  modified_base 79: mod_base = OTHER; note = 2'-O-methyl ribonucleotide
  modified_base 80: mod_base = OTHER; note = 2'-O-methyl ribonucleotide
  modified_base 82: mod_base = OTHER; note = 2'-O-methyl ribonucleotide
  modified_base 83: mod_base = OTHER; note = 2'-O-methyl ribonucleotide
  modified_base 84: mod_base = OTHER; note = 2'-O-methyl ribonucleotide
  modified_base 85: mod_base = OTHER; note = 2'-O-methyl ribonucleotide
  modified_base 86: mod_base = OTHER; note = 2'-O-methyl ribonucleotide
  modified_base 87: mod_base = OTHER; note = 2'-O-methyl ribonucleotide
  modified_base 89: mod_base = OTHER; note = 2'-O-methyl ribonucleotide
  modified_base 91: mod_base = OTHER; note = 2'-O-methyl ribonucleotide
  modified_base 92: mod_base = OTHER; note = 2'-O-methyl ribonucleotide
  modified_base 93: mod_base = OTHER; note = 2'-O-methyl ribonucleotide
  modified_base 94: mod_base = OTHER; note = 2'-O-methyl ribonucleotide
  modified_base 95: mod_base = OTHER; note = 2'-O-methyl ribonucleotide
  modified_base 96: mod_base = OTHER; note = 2'-O-methyl ribonucleotide
  modified_base 97: mod_base = OTHER; note = 2'-O-methyl ribonucleotide
  modified_base 98: mod_base = OTHER; note = 2'-O-methyl ribonucleotide
  modified_base 99: mod_base = OTHER; note = 2'-O-methyl ribonucleotide
  modified_base 100: mod_base = OTHER; note = 2'-O-methyl ribonucleotide
  modified_base 101: mod_base = OTHER; note = uniform ribonucleotides (A, C, G, inosine or U), deoxynucleotides (A, G, C, inosine or T), ribonebularine, 2'-O-methylnebularine or deoxynebularine
  modified_base 102: mod_base = OTHER; note = uniform ribonucleotides (A, C, G, inosine or U), deoxynucleotides (A, G, C, inosine or T), ribonebularine, 2'-O-methylnebularine or deoxynebularine
  modified_base 103: mod_base = OTHER; note = uniform ribonucleotides (A, C, G, inosine or U), deoxynucleotides (A, G, C, inosine or T), ribonebularine, 2'-O-methylnebularine or deoxynebularine
  modified_base 1..3: mod_base = OTHER; note = phosphorothioate linkage
  modified_base 45..46: mod_base = OTHER; note = phosphorothioate linkage
  modified_base 98..100: mod_base = OTHER; note = phosphorothioate linkage
  misc_feature 1..100: note = RNA
  misc_feature 101..103: note = Optionally DNA or RNA

SEQ ID NO: 3094 - DNA, 103 bp, synthetic construct; identical to SEQ ID NO: 1797
  source 1..103: mol_type = other DNA
  modified_base 1: mod_base = OTHER; note = 2'-O-methyl ribonucleotide
  modified_base 2: mod_base = OTHER; note = 2'-O-methyl ribonucleotide
  modified_base 3: mod_base = OTHER; note = 2'-O-methyl ribonucleotide
  modified_base 21: mod_base = OTHER; note = 2'-O-methyl ribonucleotide
  modified_base 28: mod_base = OTHER; note = 2'-O-methyl ribonucleotide
  modified_base 29: mod_base = OTHER; note = 2'-O-methyl ribonucleotide
  modified_base 30: mod_base = OTHER; note = 2'-O-methyl ribonucleotide
  modified_base 31: mod_base = OTHER; note = 2'-O-methyl ribonucleotide
  modified_base 32: mod_base = OTHER; note = 2'-O-methyl ribonucleotide
  modified_base 34: mod_base = OTHER; note = 2'-O-methyl ribonucleotide
  modified_base 35: mod_base = OTHER; note = 2'-O-methyl ribonucleotide
  modified_base 36: mod_base = OTHER; note = 2'-O-methyl ribonucleotide
  modified_base 37: mod_base = OTHER; note = 2'-O-methyl ribonucleotide
  modified_base 38: mod_base = OTHER; note = 2'-O-methyl ribonucleotide
  modified_base 39: mod_base = OTHER; note = 2'-O-methyl ribonucleotide
  modified_base 40: mod_base = OTHER; note = 2'-O-methyl ribonucleotide
  modified_base 41: mod_base = OTHER; note = 2'-O-methyl ribonucleotide
  modified_base 42: mod_base = OTHER; note = 2'-O-methyl ribonucleotide
  modified_base 46: mod_base = OTHER; note = 2'-O-methyl ribonucleotide
  modified_base 48: mod_base = OTHER; note = 2'-O-methyl ribonucleotide
  modified_base 50: mod_base = OTHER; note = 2'-O-methyl ribonucleotide
  modified_base 52: mod_base = OTHER; note = 2'-O-methyl ribonucleotide
  modified_base 53: mod_base = OTHER; note = 2'-O-methyl ribonucleotide
  modified_base 54: mod_base = OTHER; note = 2'-O-methyl ribonucleotide
  modified_base 55: mod_base = OTHER; note = 2'-O-methyl ribonucleotide
  modified_base 56: mod_base = OTHER; note = 2'-O-methyl ribonucleotide
  modified_base 57: mod_base = OTHER; note = 2'-O-methyl ribonucleotide
  modified_base 60: mod_base = OTHER; note = 2'-O-methyl ribonucleotide
  modified_base 61: mod_base = OTHER; note = 2'-O-methyl ribonucleotide
  modified_base 66: mod_base = OTHER; note = 2'-O-methyl ribonucleotide
  modified_base 67: mod_base = OTHER; note = 2'-O-methyl ribonucleotide
  modified_base 70: mod_base = OTHER; note = 2'-O-methyl ribonucleotide
  modified_base 71: mod_base = OTHER; note = 2'-O-methyl ribonucleotide
  modified_base 72: mod_base = OTHER; note = 2'-O-methyl ribonucleotide
  modified_base 74: mod_base = OTHER; note = 2'-O-methyl ribonucleotide
  modified_base 75: mod_base = OTHER; note = 2'-O-methyl ribonucleotide
  modified_base 76: mod_base = OTHER; note = 2'-O-methyl ribonucleotide
  modified_base 77: mod_base = OTHER; note = 2'-O-methyl ribonucleotide
  modified_base 78: mod_base = OTHER; note = 2'-O-methyl ribonucleotide
  modified_base 79: mod_base = OTHER; note = 2'-O-methyl ribonucleotide
  modified_base 80: mod_base = OTHER; note = 2'-O-methyl ribonucleotide
  modified_base 82: mod_base = OTHER; note = 2'-O-methyl ribonucleotide
  modified_base 83: mod_base = OTHER; note = 2'-O-methyl ribonucleotide
  modified_base 84: mod_base = OTHER; note = 2'-O-methyl ribonucleotide
  modified_base 85: mod_base = OTHER; note = 2'-O-methyl ribonucleotide
  modified_base 86: mod_base = OTHER; note = 2'-O-methyl ribonucleotide
  modified_base 87: mod_base = OTHER; note = 2'-O-methyl ribonucleotide
  modified_base 89: mod_base = OTHER; note = 2'-O-methyl ribonucleotide
  modified_base 92: mod_base = OTHER; note = 2'-O-methyl ribonucleotide
  modified_base 93: mod_base = OTHER; note = 2'-O-methyl ribonucleotide
  modified_base 94: mod_base = OTHER; note = 2'-O-methyl ribonucleotide
  modified_base 95: mod_base = OTHER; note = 2'-O-methyl ribonucleotide
  modified_base 96: mod_base = OTHER; note = 2'-O-methyl ribonucleotide
  modified_base 97: mod_base = OTHER; note = 2'-O-methyl ribonucleotide
  modified_base 98: mod_base = OTHER; note = 2'-O-methyl ribonucleotide
  modified_base 99: mod_base = OTHER; note = 2'-O-methyl ribonucleotide
  modified_base 100: mod_base = OTHER; note = 2'-O-methyl ribonucleotide
  modified_base 101: mod_base = OTHER; note = uniform ribonucleotides (A, C, G, inosine or U), deoxynucleotides (A, G, C, inosine or T), ribonebularine, 2'-O-methylnebularine or deoxynebularine
  modified_base 102: mod_base = OTHER; note = uniform ribonucleotides (A, C, G, inosine or U), deoxynucleotides (A, G, C, inosine or T), ribonebularine, 2'-O-methylnebularine or deoxynebularine
  modified_base 103: mod_base = OTHER; note = uniform ribonucleotides (A, C, G, inosine or U), deoxynucleotides (A, G, C, inosine or T), ribonebularine, 2'-O-methylnebularine or deoxynebularine
  modified_base 1..3: mod_base = OTHER; note = phosphorothioate linkage
  modified_base 45..46: mod_base = OTHER; note = phosphorothioate linkage
  modified_base 98..100: mod_base = OTHER; note = phosphorothioate linkage
  misc_feature 1..100: note = RNA
  misc_feature 101..103: note = Optionally DNA or RNA

SEQ ID NO: 3095 - DNA, 103 bp, synthetic construct; identical to SEQ ID NO: 1795
  source 1..103: mol_type = other DNA
  modified_base 1: mod_base = OTHER; note = 2'-O-methyl ribonucleotide
  modified_base 2: mod_base = OTHER; note = 2'-O-methyl ribonucleotide
  modified_base 3: mod_base = OTHER; note = 2'-O-methyl ribonucleotide
  modified_base 21: mod_base = OTHER; note = 2'-O-methyl ribonucleotide
  modified_base 28: mod_base = OTHER; note = 2'-O-methyl ribonucleotide
  modified_base 29: mod_base = OTHER; note = 2'-O-methyl ribonucleotide
  modified_base 30: mod_base = OTHER; note = 2'-O-methyl ribonucleotide
  modified_base 31: mod_base = OTHER; note = 2'-O-methyl ribonucleotide
  modified_base 32: mod_base = OTHER; note = 2'-O-methyl ribonucleotide
  modified_base 33: mod_base = OTHER; note = 2'-O-methyl ribonucleotide
  modified_base 34: mod_base = OTHER; note = 2'-O-methyl ribonucleotide
  modified_base 35: mod_base = OTHER; note = 2'-O-methyl ribonucleotide
  modified_base 36: mod_base = OTHER; note = 2'-O-methyl ribonucleotide
  modified_base 37: mod_base = OTHER; note = 2'-O-methyl ribonucleotide
  modified_base 38: mod_base = OTHER; note = 2'-O-methyl ribonucleotide
  modified_base 39: mod_base = OTHER; note = 2'-O-methyl ribonucleotide
  modified_base 40: mod_base = OTHER; note = 2'-O-methyl ribonucleotide
  modified_base 41: mod_base = OTHER; note = 2'-O-methyl ribonucleotide
  modified_base 42: mod_base = OTHER; note = 2'-O-methyl ribonucleotide
  modified_base 46: mod_base = OTHER; note = 2'-O-methyl ribonucleotide
  modified_base 48: mod_base = OTHER; note = 2'-O-methyl ribonucleotide
  modified_base 50: mod_base = OTHER; note = 2'-O-methyl ribonucleotide
  modified_base 52: mod_base = OTHER; note = 2'-O-methyl ribonucleotide
  modified_base 53: mod_base = OTHER; note = 2'-O-methyl ribonucleotide
  modified_base 54: mod_base = OTHER; note = 2'-O-methyl ribonucleotide
  modified_base 55: mod_base = OTHER; note = 2'-O-methyl ribonucleotide
  modified_base 56: mod_base = OTHER; note = 2'-O-methyl ribonucleotide
  modified_base 57: mod_base = OTHER; note = 2'-O-methyl ribonucleotide
  modified_base 60: mod_base = OTHER; note = 2'-O-methyl ribonucleotide
  modified_base 61: mod_base = OTHER; note = 2'-O-methyl ribonucleotide
  modified_base 66: mod_base = OTHER; note = 2'-O-methyl ribonucleotide
  modified_base 67: mod_base = OTHER; note = 2'-O-methyl ribonucleotide
  modified_base 70: mod_base = OTHER; note = 2'-O-methyl ribonucleotide
  modified_base 71: mod_base = OTHER; note = 2'-O-methyl ribonucleotide
  modified_base 72: mod_base = OTHER; note = 2'-O-methyl ribonucleotide
  modified_base 73: mod_base = OTHER; note = 2'-O-methyl ribonucleotide
  modified_base 74: mod_base = OTHER; note = 2'-O-methyl ribonucleotide
  modified_base 75: mod_base = OTHER; note = 2'-O-methyl ribonucleotide
  modified_base 76: mod_base = OTHER; note = 2'-O-methyl ribonucleotide
  modified_base 77: mod_base = OTHER; note = 2'-O-methyl ribonucleotide
  modified_base 78: mod_base = OTHER; note = 2'-O-methyl ribonucleotide
  modified_base 79: mod_base = OTHER; note = 2'-O-methyl ribonucleotide
  modified_base 80: mod_base = OTHER; note = 2'-O-methyl ribonucleotide
  modified_base 81: mod_base = OTHER; note = 2'-O-methyl ribonucleotide
  modified_base 83: mod_base = OTHER; note = 2'-O-methyl ribonucleotide
  modified_base 84: mod_base = OTHER; note = 2'-O-methyl ribonucleotide
  modified_base 85: mod_base = OTHER; note = 2'-O-methyl ribonucleotide
  modified_base 86: mod_base = OTHER; note = 2'-O-methyl ribonucleotide
  modified_base 87: mod_base = OTHER; note = 2'-O-methyl ribonucleotide
  modified_base 88: mod_base = OTHER; note = 2'-O-methyl ribonucleotide
  modified_base 89: mod_base = OTHER; note = 2'-O-methyl ribonucleotide
  modified_base 90: mod_base = OTHER; note = 2'-O-methyl ribonucleotide
  modified_base 91: mod_base = OTHER; note = 2'-O-methyl ribonucleotide
  modified_base 92: mod_base = OTHER; note = 2'-O-methyl ribonucleotide
  modified_base 93: mod_base = OTHER; note = 2'-O-methyl ribonucleotide
  modified_base 94: mod_base = OTHER; note = 2'-O-methyl ribonucleotide
  modified_base 95: mod_base = OTHER; note = 2'-O-methyl ribonucleotide
  modified_base 96: mod_base = OTHER; note = 2'-O-methyl ribonucleotide
  modified_base 97: mod_base = OTHER; note = 2'-O-methyl ribonucleotide
  modified_base 98: mod_base = OTHER; note = 2'-O-methyl ribonucleotide
  modified_base 99: mod_base = OTHER; note = 2'-O-methyl ribonucleotide
  modified_base 100: mod_base = OTHER; note = 2'-O-methyl ribonucleotide
  modified_base 101: mod_base = OTHER; note = uniform ribonucleotides (A, C, G, inosine or U), deoxynucleotides (A, G, C, inosine or T), ribonebularine, 2'-O-methylnebularine or deoxynebularine
  modified_base 102: mod_base = OTHER; note = uniform ribonucleotides (A, C, G, inosine or U), deoxynucleotides (A, G, C, inosine or T), ribonebularine, 2'-O-methylnebularine or deoxynebularine
  modified_base 103: mod_base = OTHER; note = uniform ribonucleotides (A, C, G, inosine or U), deoxynucleotides (A, G, C, inosine or T), ribonebularine, 2'-O-methylnebularine or deoxynebularine
  modified_base 1..3: mod_base = OTHER; note = phosphorothioate linkage
  modified_base 25..26: mod_base = OTHER; note = phosphorothioate linkage
  modified_base 98..100: mod_base = OTHER; note = phosphorothioate linkage
  misc_feature 1..100: note = RNA
  misc_feature 101..103: note = Optionally DNA or RNA

SEQ ID NO: 3096 - DNA, 103 bp, synthetic construct; identical to SEQ ID NO: 1795
  source 1..103: mol_type = other DNA
  modified_base 1: mod_base = OTHER; note = 2'-O-methyl ribonucleotide
  modified_base 2: mod_base = OTHER; note = 2'-O-methyl ribonucleotide
  modified_base 3: mod_base = OTHER; note = 2'-O-methyl ribonucleotide
  modified_base 21: mod_base = OTHER; note = 2'-O-methyl ribonucleotide
  modified_base 28: mod_base = OTHER; note = 2'-O-methyl ribonucleotide
  modified_base 29: mod_base = OTHER; note = 2'-O-methyl ribonucleotide
  modified_base 30: mod_base = OTHER; note = 2'-O-methyl ribonucleotide
  modified_base 31: mod_base = OTHER; note = 2'-O-methyl ribonucleotide
  modified_base 32: mod_base = OTHER; note = 2'-O-methyl ribonucleotide
  modified_base 34: mod_base = OTHER; note = 2'-O-methyl ribonucleotide
  modified_base 35: mod_base = OTHER; note = 2'-O-methyl ribonucleotide
  modified_base 36: mod_base = OTHER; note = 2'-O-methyl ribonucleotide
  modified_base 37: mod_base = OTHER; note = 2'-O-methyl ribonucleotide
  modified_base 38: mod_base = OTHER; note = 2'-O-methyl ribonucleotide
  modified_base 39: mod_base = OTHER; note = 2'-O-methyl ribonucleotide
  modified_base 40: mod_base = OTHER; note = 2'-O-methyl ribonucleotide
  modified_base 41: mod_base = OTHER; note = 2'-O-methyl ribonucleotide
  modified_base 42: mod_base = OTHER; note = 2'-O-methyl ribonucleotide
  modified_base 46: mod_base = OTHER; note = 2'-O-methyl ribonucleotide
  modified_base 48: mod_base = OTHER; note = 2'-O-methyl ribonucleotide
  modified_base 50: mod_base = OTHER; note = 2'-O-methyl ribonucleotide
  modified_base 52: mod_base = OTHER; note = 2'-O-methyl ribonucleotide
  modified_base 53: mod_base = OTHER; note = 2'-O-methyl ribonucleotide
  modified_base 54: mod_base = OTHER; note = 2'-O-methyl ribonucleotide
  modified_base 55: mod_base = OTHER; note = 2'-O-methyl ribonucleotide
  modified_base 56: mod_base = OTHER; note = 2'-O-methyl ribonucleotide
  modified_base 57: mod_base = OTHER; note = 2'-O-methyl ribonucleotide
  modified_base 60: mod_base = OTHER; note = 2'-O-methyl ribonucleotide
  modified_base 61: mod_base = OTHER; note = 2'-O-methyl ribonucleotide
  modified_base 66: mod_base = OTHER; note = 2'-O-methyl ribonucleotide
  modified_base 67: mod_base = OTHER; note = 2'-O-methyl ribonucleotide
  modified_base 70: mod_base = OTHER; note = 2'-O-methyl ribonucleotide
  modified_base 71: mod_base = OTHER; note = 2'-O-methyl ribonucleotide
  modified_base 72: mod_base = OTHER; note = 2'-O-methyl ribonucleotide
  modified_base 74: mod_base = OTHER; note = 2'-O-methyl ribonucleotide
  modified_base 75: mod_base = OTHER; note = 2'-O-methyl ribonucleotide
  modified_base 76: mod_base = OTHER; note = 2'-O-methyl ribonucleotide
  modified_base 77: mod_base = OTHER; note = 2'-O-methyl ribonucleotide
  modified_base 78: mod_base = OTHER; note = 2'-O-methyl ribonucleotide
  modified_base 79: mod_base = OTHER; note = 2'-O-methyl ribonucleotide
  modified_base 80: mod_base = OTHER; note = 2'-O-methyl ribonucleotide
  modified_base 81: mod_base = OTHER; note = 2'-O-methyl ribonucleotide
  modified_base 83: mod_base = OTHER; note = 2'-O-methyl ribonucleotide
  modified_base 84: mod_base = OTHER; note = 2'-O-methyl ribonucleotide
  modified_base 85: mod_base = OTHER; note = 2'-O-methyl ribonucleotide
  modified_base 86: mod_base = OTHER; note = 2'-O-methyl ribonucleotide
  modified_base 87: mod_base = OTHER; note = 2'-O-methyl ribonucleotide
  modified_base 88: mod_base = OTHER; note = 2'-O-methyl ribonucleotide
  modified_base 89: mod_base = OTHER; note = 2'-O-methyl ribonucleotide
  modified_base 90: mod_base = OTHER; note = 2'-O-methyl ribonucleotide
  modified_base 91: mod_base = OTHER; note = 2'-O-methyl ribonucleotide
  modified_base 92: mod_base = OTHER; note = 2'-O-methyl ribonucleotide
  modified_base 93: mod_base = OTHER; note = 2'-O-methyl ribonucleotide
  modified_base 94: mod_base = OTHER; note = 2'-O-methyl ribonucleotide
  modified_base 95: mod_base = OTHER; note = 2'-O-methyl ribonucleotide
  modified_base 96: mod_base = OTHER; note = 2'-O-methyl ribonucleotide
  modified_base 97: mod_base = OTHER; note = 2'-O-methyl ribonucleotide
  modified_base 98: mod_base = OTHER; note = 2'-O-methyl ribonucleotide
  modified_base 99: mod_base = OTHER; note = 2'-O-methyl ribonucleotide
  modified_base 100: mod_base = OTHER; note = 2'-O-methyl ribonucleotide
  modified_base 101: mod_base = OTHER; note = uniform ribonucleotides (A, C, G, inosine or U), deoxynucleotides (A, G, C, inosine or T), ribonebularine, 2'-O-methylnebularine or deoxynebularine
  modified_base 102: mod_base = OTHER; note = uniform ribonucleotides (A, C, G, inosine or U), deoxynucleotides (A, G, C, inosine or T), ribonebularine, 2'-O-methylnebularine or deoxynebularine
  modified_base 103: mod_base = OTHER; note = uniform ribonucleotides (A, C, G, inosine or U), deoxynucleotides (A, G, C, inosine or T), ribonebularine, 2'-O-methylnebularine or deoxynebularine
  modified_base 1..3: mod_base = OTHER; note = phosphorothioate linkage
  modified_base 25..26: mod_base = OTHER; note = phosphorothioate linkage
  modified_base 98..100: mod_base = OTHER; note = phosphorothioate linkage
  misc_feature 1..100: note = RNA
  misc_feature 101..103: note = Optionally DNA or RNA

SEQ ID NO: 3097 - DNA, 103 bp, synthetic construct; identical to SEQ ID NO: 1796
  source 1..103: mol_type = other DNA
  modified_base 1: mod_base = OTHER; note = 2'-O-methyl ribonucleotide
  modified_base 2: mod_base = OTHER; note = 2'-O-methyl ribonucleotide
  modified_base 3: mod_base = OTHER; note = 2'-O-methyl ribonucleotide
  modified_base 21: mod_base = OTHER; note = 2'-O-methyl ribonucleotide
  modified_base 28: mod_base = OTHER; note = 2'-O-methyl ribonucleotide
  modified_base 29: mod_base = OTHER; note = 2'-O-methyl ribonucleotide
  modified_base 30: mod_base = OTHER; note = 2'-O-methyl ribonucleotide
  modified_base 31: mod_base = OTHER; note = 2'-O-methyl ribonucleotide
  modified_base 32: mod_base = OTHER; note = 2'-O-methyl ribonucleotide
  modified_base 33: mod_base = OTHER; note = 2'-O-methyl ribonucleotide
  modified_base 34: mod_base = OTHER; note = 2'-O-methyl ribonucleotide
  modified_base 35: mod_base = OTHER; note = 2'-O-methyl ribonucleotide
  modified_base 36: mod_base = OTHER; note = 2'-O-methyl ribonucleotide
  modified_base 37: mod_base = OTHER; note = 2'-O-methyl ribonucleotide
  modified_base 38: mod_base = OTHER; note = 2'-O-methyl ribonucleotide
  modified_base 39: mod_base = OTHER; note = 2'-O-methyl ribonucleotide
  modified_base 40: mod_base = OTHER; note = 2'-O-methyl ribonucleotide
  modified_base 41: mod_base = OTHER; note = 2'-O-methyl ribonucleotide
  modified_base 42: mod_base = OTHER; note = 2'-O-methyl ribonucleotide
  modified_base 46: mod_base = OTHER; note = 2'-O-methyl ribonucleotide
  modified_base 48: mod_base = OTHER; note = 2'-O-methyl ribonucleotide
  modified_base 50: mod_base = OTHER; note = 2'-O-methyl ribonucleotide
  modified_base 52: mod_base = OTHER; note = 2'-O-methyl ribonucleotide
  modified_base 53: mod_base = OTHER; note = 2'-O-methyl ribonucleotide
  modified_base 54: mod_base = OTHER; note = 2'-O-methyl ribonucleotide
  modified_base 55: mod_base = OTHER; note = 2'-O-methyl ribonucleotide
  modified_base 56: mod_base = OTHER; note = 2'-O-methyl ribonucleotide
  modified_base 57: mod_base = OTHER; note = 2'-O-methyl ribonucleotide
  modified_base 60: mod_base = OTHER; note = 2'-O-methyl ribonucleotide
  modified_base 61: mod_base = OTHER; note = 2'-O-methyl ribonucleotide
  modified_base 66: mod_base = OTHER; note = 2'-O-methyl ribonucleotide
  modified_base 67: mod_base = OTHER; note = 2'-O-methyl ribonucleotide
  modified_base 70: mod_base = OTHER; note = 2'-O-methyl ribonucleotide
  modified_base 71: mod_base = OTHER; note = 2'-O-methyl ribonucleotide
  modified_base 72: mod_base = OTHER; note = 2'-O-methyl ribonucleotide
  modified_base 73: mod_base = OTHER; note = 2'-O-methyl ribonucleotide
  modified_base 74: mod_base = OTHER; note = 2'-O-methyl ribonucleotide
  modified_base 75: mod_base = OTHER; note = 2'-O-methyl ribonucleotide
  modified_base 76: mod_base = OTHER; note = 2'-O-methyl ribonucleotide
  modified_base 77: mod_base = OTHER; note = 2'-O-methyl ribonucleotide
  modified_base 78: mod_base = OTHER; note = 2'-O-methyl ribonucleotide
  modified_base 79: mod_base = OTHER; note = 2'-O-methyl ribonucleotide
  modified_base 80: mod_base = OTHER; note = 2'-O-methyl ribonucleotide
  modified_base 81: mod_base = OTHER; note = 2'-O-methyl ribonucleotide
  modified_base 83: mod_base = OTHER; note = 2'-O-methyl ribonucleotide
  modified_base 84: mod_base = OTHER; note = 2'-O-methyl ribonucleotide
  modified_base 85: mod_base = OTHER; note = 2'-O-methyl ribonucleotide
  modified_base 86: mod_base = OTHER; note = 2'-O-methyl ribonucleotide
  modified_base 87: mod_base = OTHER; note = 2'-O-methyl ribonucleotide
  modified_base 88: mod_base = OTHER; note = 2'-O-methyl ribonucleotide
  modified_base 89: mod_base = OTHER; note = 2'-O-methyl ribonucleotide
  modified_base 90: mod_base = OTHER; note = 2'-O-methyl ribonucleotide
  modified_base 91: mod_base = OTHER; note = 2'-O-methyl ribonucleotide
  modified_base 92: mod_base = OTHER; note = 2'-O-methyl ribonucleotide
  modified_base 93: mod_base = OTHER; note = 2'-O-methyl ribonucleotide
  modified_base 94: mod_base = OTHER; note = 2'-O-methyl ribonucleotide
  modified_base 95: mod_base = OTHER; note = 2'-O-methyl ribonucleotide
  modified_base 96: mod_base = OTHER; note = 2'-O-methyl ribonucleotide
  modified_base 97: mod_base = OTHER; note = 2'-O-methyl ribonucleotide
  modified_base 98: mod_base = OTHER; note = 2'-O-methyl ribonucleotide
  modified_base 99: mod_base = OTHER; note = 2'-O-methyl ribonucleotide
  modified_base 100: mod_base = OTHER; note = 2'-O-methyl ribonucleotide
  modified_base 101: mod_base = OTHER; note = uniform ribonucleotides (A, C, G, inosine or U), deoxynucleotides (A, G, C, inosine or T), ribonebularine, 2'-O-methylnebularine or deoxynebularine
  modified_base 102: mod_base = OTHER; note = uniform ribonucleotides (A, C, G, inosine or U), deoxynucleotides (A, G, C, inosine or T), ribonebularine, 2'-O-methylnebularine or deoxynebularine
  modified_base 103: mod_base = OTHER; note = uniform ribonucleotides (A, C, G, inosine or U), deoxynucleotides (A, G, C, inosine or T), ribonebularine, 2'-O-methylnebularine or deoxynebularine
  modified_base 1..3: mod_base = OTHER; note = phosphorothioate linkage
  modified_base 25..26: mod_base = OTHER; note = phosphorothioate linkage
  modified_base 98..100: mod_base = OTHER; note = phosphorothioate linkage
  misc_feature 1..100: note = RNA
  misc_feature 101..103: note = Optionally DNA or RNA

SEQ ID NO: 3098 - DNA, 103 bp, synthetic construct; identical to SEQ ID NO: 1796
  source 1..103: mol_type = other DNA
  modified_base 1: mod_base = OTHER; note = 2'-O-methyl ribonucleotide
  modified_base 2: mod_base = OTHER; note = 2'-O-methyl ribonucleotide
  modified_base 3: mod_base = OTHER; note = 2'-O-methyl ribonucleotide
  modified_base 21: mod_base = OTHER; note = 2'-O-methyl ribonucleotide
  modified_base 28: mod_base = OTHER; note = 2'-O-methyl ribonucleotide
  modified_base 29: mod_base = OTHER; note = 2'-O-methyl ribonucleotide
  modified_base 30: mod_base = OTHER; note = 2'-O-methyl ribonucleotide
  modified_base 31: mod_base = OTHER; note = 2'-O-methyl ribonucleotide
  modified_base 32: mod_base = OTHER; note = 2'-O-methyl ribonucleotide
  modified_base 34: mod_base = OTHER; note = 2'-O-methyl ribonucleotide
  modified_base 35: mod_base = OTHER; note = 2'-O-methyl ribonucleotide
  modified_base 36: mod_base = OTHER; note = 2'-O-methyl ribonucleotide
  modified_base 37: mod_base = OTHER; note = 2'-O-methyl ribonucleotide
  modified_base 38: mod_base = OTHER; note = 2'-O-methyl ribonucleotide
  modified_base 39: mod_base = OTHER; note = 2'-O-methyl ribonucleotide
  modified_base 40: mod_base = OTHER; note = 2'-O-methyl ribonucleotide
  modified_base 41: mod_base = OTHER; note = 2'-O-methyl ribonucleotide
  modified_base 42: mod_base = OTHER; note = 2'-O-methyl ribonucleotide
  modified_base 46: mod_base = OTHER; note = 2'-O-methyl ribonucleotide
  modified_base 48: mod_base = OTHER; note = 2'-O-methyl ribonucleotide
  modified_base 50: mod_base = OTHER; note = 2'-O-methyl ribonucleotide
  modified_base 52: mod_base = OTHER; note = 2'-O-methyl ribonucleotide
  modified_base 53: mod_base = OTHER; note = 2'-O-methyl ribonucleotide
  modified_base 54: mod_base = OTHER; note = 2'-O-methyl ribonucleotide
  modified_base 55: mod_base = OTHER; note = 2'-O-methyl ribonucleotide
  modified_base 56: mod_base = OTHER; note = 2'-O-methyl ribonucleotide
  modified_base 57: mod_base = OTHER; note = 2'-O-methyl ribonucleotide
  modified_base 60: mod_base = OTHER; note = 2'-O-methyl ribonucleotide
  modified_base 61: mod_base = OTHER; note = 2'-O-methyl ribonucleotide
  modified_base 66: mod_base = OTHER; note = 2'-O-methyl ribonucleotide
  modified_base 67: mod_base = OTHER; note = 2'-O-methyl ribonucleotide
  modified_base 70: mod_base = OTHER; note = 2'-O-methyl ribonucleotide
  modified_base 71: mod_base = OTHER; note = 2'-O-methyl ribonucleotide
  modified_base 72: mod_base = OTHER; note = 2'-O-methyl ribonucleotide
  modified_base 74: mod_base = OTHER; note = 2'-O-methyl ribonucleotide
  modified_base 75: mod_base = OTHER; note = 2'-O-methyl ribonucleotide
  modified_base 76: mod_base = OTHER; note = 2'-O-methyl ribonucleotide
  modified_base 77: mod_base = OTHER; note = 2'-O-methyl ribonucleotide
  modified_base 78: mod_base = OTHER; note = 2'-O-methyl ribonucleotide
  modified_base 79: mod_base = OTHER; note = 2'-O-methyl ribonucleotide
  modified_base 80: mod_base = OTHER; note = 2'-O-methyl ribonucleotide
  modified_base 81: mod_base = OTHER; note = 2'-O-methyl ribonucleotide
  modified_base 83: mod_base = OTHER; note = 2'-O-methyl ribonucleotide
  modified_base 84: mod_base = OTHER; note = 2'-O-methyl ribonucleotide
  modified_base 85: mod_base = OTHER; note = 2'-O-methyl ribonucleotide
  modified_base 86: mod_base = OTHER; note = 2'-O-methyl ribonucleotide
  modified_base 87: mod_base = OTHER; note = 2'-O-methyl ribonucleotide
  modified_base 88: mod_base = OTHER; note = 2'-O-methyl ribonucleotide
  modified_base 89: mod_base = OTHER; note = 2'-O-methyl ribonucleotide
  modified_base 90: mod_base = OTHER; note = 2'-O-methyl ribonucleotide
  modified_base 91: mod_base = OTHER; note = 2'-O-methyl ribonucleotide
  modified_base 92: mod_base = OTHER; note = 2'-O-methyl ribonucleotide
  modified_base 93: mod_base = OTHER; note = 2'-O-methyl ribonucleotide
  modified_base 94: mod_base = OTHER; note = 2'-O-methyl ribonucleotide
  modified_base 95: mod_base = OTHER; note = 2'-O-methyl ribonucleotide
  modified_base 96: mod_base = OTHER; note = 2'-O-methyl ribonucleotide
  modified_base 97: mod_base = OTHER; note = 2'-O-methyl ribonucleotide
  modified_base 98: mod_base = OTHER; note = 2'-O-methyl ribonucleotide
  modified_base 99: mod_base = OTHER; note = 2'-O-methyl ribonucleotide
  modified_base 100: mod_base = OTHER; note = 2'-O-methyl ribonucleotide
  modified_base 101: mod_base = OTHER; note = uniform ribonucleotides (A, C, G, inosine or U), deoxynucleotides (A, G, C, inosine or T), ribonebularine, 2'-O-methylnebularine or deoxynebularine
  modified_base 102: mod_base = OTHER; note = uniform ribonucleotides (A, C, G, inosine or U), deoxynucleotides (A, G, C, inosine or T), ribonebularine, 2'-O-methylnebularine or deoxynebularine
  modified_base 103: mod_base = OTHER; note = uniform ribonucleotides (A, C, G, inosine or U), deoxynucleotides (A, G, C, inosine or T), ribonebularine, 2'-O-methylnebularine or deoxynebularine
  modified_base 1..3: mod_base = OTHER; note = phosphorothioate linkage
  modified_base 25..26: mod_base = OTHER; note = phosphorothioate linkage
  modified_base 98..100: mod_base = OTHER; note = phosphorothioate linkage
  misc_feature 1..100: note = RNA
  misc_feature 101..103: note = Optionally DNA or RNA

SEQ ID NO: 3099 - DNA, 103 bp, synthetic construct; identical to SEQ ID NO: 1797
  source 1..103: mol_type = other DNA
  modified_base 1: mod_base = OTHER; note = 2'-O-methyl ribonucleotide
  modified_base 2: mod_base = OTHER; note = 2'-O-methyl ribonucleotide
  modified_base 3: mod_base = OTHER; note = 2'-O-methyl ribonucleotide
  modified_base 21: mod_base = OTHER; note = 2'-O-methyl ribonucleotide
  modified_base 28: mod_base = OTHER; note = 2'-O-methyl ribonucleotide
  modified_base 29: mod_base = OTHER; note = 2'-O-methyl ribonucleotide
  modified_base 30: mod_base = OTHER; note = 2'-O-methyl ribonucleotide
  modified_base 31: mod_base = OTHER; note = 2'-O-methyl ribonucleotide
  modified_base 32: mod_base = OTHER; note = 2'-O-methyl ribonucleotide
  modified_base 33: mod_base = OTHER; note = 2'-O-methyl ribonucleotide
  modified_base 34: mod_base = OTHER; note = 2'-O-methyl ribonucleotide
  modified_base 35: mod_base = OTHER; note = 2'-O-methyl ribonucleotide
  modified_base 36: mod_base = OTHER; note = 2'-O-methyl ribonucleotide
  modified_base 37: mod_base = OTHER; note = 2'-O-methyl ribonucleotide
  modified_base 38: mod_base = OTHER; note = 2'-O-methyl ribonucleotide
  modified_base 39: mod_base = OTHER; note = 2'-O-methyl ribonucleotide
  modified_base 40: mod_base = OTHER; note = 2'-O-methyl ribonucleotide
  modified_base 41: mod_base = OTHER; note = 2'-O-methyl ribonucleotide
  modified_base 42: mod_base = OTHER; note = 2'-O-methyl ribonucleotide
  modified_base 46: mod_base = OTHER; note = 2'-O-methyl ribonucleotide
  modified_base 48: mod_base = OTHER; note = 2'-O-methyl ribonucleotide
  modified_base 50: mod_base = OTHER; note = 2'-O-methyl ribonucleotide
  modified_base 52: mod_base = OTHER; note = 2'-O-methyl ribonucleotide
  modified_base 53: mod_base = OTHER; note = 2'-O-methyl ribonucleotide
  modified_base 54: mod_base = OTHER; note = 2'-O-methyl ribonucleotide
  modified_base 57: mod_base = OTHER; note = 2'-O-methyl ribonucleotide
  modified_base 61: mod_base = OTHER; note = 2'-O-methyl ribonucleotide
  modified_base 66: mod_base = OTHER; note = 2'-O-methyl ribonucleotide
  modified_base 67: mod_base = OTHER; note = 2'-O-methyl ribonucleotide
  modified_base 70: mod_base = OTHER; note = 2'-O-methyl ribonucleotide
  modified_base 71: mod_base = OTHER; note = 2'-O-methyl ribonucleotide
  modified_base 72: mod_base = OTHER; note = 2'-O-methyl ribonucleotide
  modified_base 74: mod_base = OTHER; note = 2'-O-methyl ribonucleotide
  modified_base 75: mod_base = OTHER; note = 2'-O-methyl ribonucleotide
  modified_base 76: mod_base = OTHER; note = 2'-O-methyl ribonucleotide
  modified_base 77: mod_base = OTHER; note = 2'-O-methyl ribonucleotide
  modified_base 78: mod_base = OTHER; note = 2'-O-methyl ribonucleotide
  modified_base 79: mod_base = OTHER; note = 2'-O-methyl ribonucleotide
  modified_base 80: mod_base = OTHER; note = 2'-O-methyl ribonucleotide
  modified_base 82: mod_base = OTHER; note = 2'-O-methyl ribonucleotide
  modified_base 83: mod_base = OTHER; note = 2'-O-methyl ribonucleotide
  modified_base 84: mod_base = OTHER; note = 2'-O-methyl ribonucleotide
  modified_base 85: mod_base = OTHER; note = 2'-O-methyl ribonucleotide
  modified_base 86: mod_base = OTHER; note = 2'-O-methyl ribonucleotide
  modified_base 87: mod_base = OTHER; note = 2'-O-methyl ribonucleotide
  modified_base 89: mod_base = OTHER; note = 2'-O-methyl ribonucleotide
  modified_base 92: mod_base = OTHER; note = 2'-O-methyl ribonucleotide
  modified_base 93: mod_base = OTHER; note = 2'-O-methyl ribonucleotide
  modified_base 94: mod_base = OTHER; note = 2'-O-methyl ribonucleotide
  modified_base 95: mod_base = OTHER; note = 2'-O-methyl ribonucleotide
  modified_base 96: mod_base = OTHER; note = 2'-O-methyl ribonucleotide
  modified_base 97: mod_base = OTHER; note = 2'-O-methyl ribonucleotide
  modified_base 98: mod_base = OTHER; note = 2'-O-methyl ribonucleotide
  modified_base 99: mod_base = OTHER; note = 2'-O-methyl ribonucleotide
  modified_base 100: mod_base = OTHER; note = 2'-O-methyl ribonucleotide
  modified_base 101: mod_base = OTHER; note = uniform ribonucleotides (A, C, G, inosine or U), deoxynucleotides (A, G, C, inosine or T), ribonebularine, 2'-O-methylnebularine or deoxynebularine
  modified_base 102: mod_base = OTHER; note = uniform ribonucleotides (A, C, G, inosine or U), deoxynucleotides (A, G, C, inosine or T), ribonebularine, 2'-O-methylnebularine or deoxynebularine
  modified_base 103: mod_base = OTHER; note = uniform ribonucleotides (A, C, G, inosine or U), deoxynucleotides (A, G, C, inosine or T), ribonebularine, 2'-O-methylnebularine or deoxynebularine
  modified_base 1..3: mod_base = OTHER; note = phosphorothioate linkage
  modified_base 25..26: mod_base = OTHER; note = phosphorothioate linkage
  modified_base 98..100: mod_base = OTHER; note = phosphorothioate linkage
  misc_feature 1..100: note = RNA
  misc_feature 101..103: note = Optionally DNA or RNA

SEQ ID NO: 3100 - DNA, 103 bp, synthetic construct; identical to SEQ ID NO: 1797
  source 1..103: mol_type = other DNA
  modified_base 1: mod_base = OTHER; note = 2'-O-methyl ribonucleotide
  modified_base 2: mod_base = OTHER; note = 2'-O-methyl ribonucleotide
  modified_base 3: mod_base = OTHER; note = 2'-O-methyl ribonucleotide
  modified_base 21: mod_base = OTHER; note = 2'-O-methyl ribonucleotide
  modified_base 28: mod_base = OTHER; note = 2'-O-methyl ribonucleotide
  modified_base 29: mod_base = OTHER; note = 2'-O-methyl ribonucleotide
  modified_base 30: mod_base = OTHER; note = 2'-O-methyl ribonucleotide
  modified_base 31: mod_base = OTHER; note = 2'-O-methyl ribonucleotide
  modified_base 32: mod_base = OTHER; note = 2'-O-methyl ribonucleotide
  modified_base 33: mod_base = OTHER; note = 2'-O-methyl ribonucleotide
  modified_base 34: mod_base = OTHER; note = 2'-O-methyl ribonucleotide
  modified_base 35: mod_base = OTHER; note = 2'-O-methyl ribonucleotide
  modified_base 36: mod_base = OTHER; note = 2'-O-methyl ribonucleotide
  modified_base 37: mod_base = OTHER; note = 2'-O-methyl ribonucleotide
  modified_base 38: mod_base = OTHER; note = 2'-O-methyl ribonucleotide
  modified_base 39: mod_base = OTHER; note = 2'-O-methyl ribonucleotide
  modified_base 40: mod_base = OTHER; note = 2'-O-methyl ribonucleotide
  modified_base 41: mod_base = OTHER; note = 2'-O-methyl ribonucleotide
  modified_base 42: mod_base = OTHER; note = 2'-O-methyl ribonucleotide
  modified_base 46: mod_base = OTHER; note = 2'-O-methyl ribonucleotide
  modified_base 48: mod_base = OTHER; note = 2'-O-methyl ribonucleotide
  modified_base 50: mod_base = OTHER; note = 2'-O-methyl ribonucleotide
  modified_base 52: mod_base = OTHER; note = 2'-O-methyl ribonucleotide
  modified_base 53: mod_base = OTHER; note = 2'-O-methyl ribonucleotide
  modified_base 54: mod_base = OTHER; note = 2'-O-methyl ribonucleotide
  modified_base 55: mod_base = OTHER; note = 2'-O-methyl ribonucleotide
  modified_base 56: mod_base = OTHER; note = 2'-O-methyl ribonucleotide
  modified_base 57: mod_base = OTHER; note = 2'-O-methyl ribonucleotide
  modified_base 60: mod_base = OTHER; note = 2'-O-methyl ribonucleotide
  modified_base 61: mod_base = OTHER; note = 2'-O-methyl ribonucleotide
  modified_base 66: mod_base = OTHER; note = 2'-O-methyl ribonucleotide
  modified_base 67: mod_base = OTHER; note = 2'-O-methyl ribonucleotide
  modified_base 70: mod_base = OTHER; note = 2'-O-methyl ribonucleotide
  modified_base 71: mod_base = OTHER; note = 2'-O-methyl ribonucleotide
  modified_base 72: mod_base = OTHER; note = 2'-O-methyl ribonucleotide
  modified_base 74: mod_base = OTHER; note = 2'-O-methyl ribonucleotide
  modified_base 75: mod_base = OTHER; note = 2'-O-methyl ribonucleotide
  modified_base 76: mod_base = OTHER; note = 2'-O-methyl ribonucleotide
  modified_base 77: mod_base = OTHER; note = 2'-O-methyl ribonucleotide
  modified_base 78: mod_base = OTHER; note = 2'-O-methyl ribonucleotide
  modified_base 79: mod_base = OTHER; note = 2'-O-methyl ribonucleotide
  modified_base 80: mod_base = OTHER; note = 2'-O-methyl ribonucleotide
  modified_base 82: mod_base = OTHER; note = 2'-O-methyl ribonucleotide
  modified_base 83: mod_base = OTHER; note = 2'-O-methyl ribonucleotide
  modified_base 84: mod_base = OTHER; note = 2'-O-methyl ribonucleotide
  modified_base 85: mod_base = OTHER; note = 2'-O-methyl ribonucleotide
  modified_base 86: mod_base = OTHER; note = 2'-O-methyl ribonucleotide
  modified_base 87: mod_base = OTHER; note = 2'-O-methyl ribonucleotide
  modified_base 89: mod_base = OTHER; note = 2'-O-methyl ribonucleotide
  modified_base 92: mod_base = OTHER; note = 2'-O-methyl ribonucleotide
  modified_base 93: mod_base = OTHER; note = 2'-O-methyl ribonucleotide
  modified_base 94: mod_base = OTHER; note = 2'-O-methyl ribonucleotide
  modified_base 95: mod_base = OTHER; note = 2'-O-methyl ribonucleotide
  modified_base 96: mod_base = OTHER; note = 2'-O-methyl ribonucleotide
  modified_base 97: mod_base = OTHER; note = 2'-O-methyl ribonucleotide
  modified_base 98: mod_base = OTHER; note = 2'-O-methyl ribonucleotide
  modified_base 99: mod_base = OTHER; note = 2'-O-methyl ribonucleotide
  modified_base 100: mod_base = OTHER; note = 2'-O-methyl ribonucleotide
  modified_base 101: mod_base = OTHER; note = uniform ribonucleotides (A, C, G, inosine or U), deoxynucleotides (A, G, C, inosine or T), ribonebularine, 2'-O-methylnebularine or deoxynebularine
  modified_base 102: mod_base = OTHER; note = uniform ribonucleotides (A, C, G, inosine or U), deoxynucleotides (A, G, C, inosine or T), ribonebularine, 2'-O-methylnebularine or deoxynebularine
  modified_base 103: mod_base = OTHER; note = uniform ribonucleotides (A, C, G, inosine or U), deoxynucleotides (A, G, C, inosine or T), ribonebularine, 2'-O-methylnebularine or deoxynebularine
  modified_base 1..3: mod_base = OTHER; note = phosphorothioate linkage
  modified_base 25..26: mod_base = OTHER; note = phosphorothioate linkage
  modified_base 98..100: mod_base = OTHER; note = phosphorothioate linkage
  misc_feature 1..100: note = RNA
  misc_feature 101..103: note = Optionally DNA or RNA

SEQ ID NO: 3101 - DNA, 103 bp, synthetic construct; identical to SEQ ID NO: 1797
  source 1..103: mol_type = other DNA
  modified_base 1: mod_base = OTHER; note = 2'-O-methyl ribonucleotide
  modified_base 2: mod_base = OTHER; note = 2'-O-methyl ribonucleotide
  modified_base 3: mod_base = OTHER; note = 2'-O-methyl ribonucleotide
  modified_base 21: mod_base = OTHER; note = 2'-O-methyl ribonucleotide
  modified_base 28: mod_base = OTHER; note = 2'-O-methyl ribonucleotide
  modified_base 29: mod_base = OTHER; note = 2'-O-methyl ribonucleotide
  modified_base 30: mod_base = OTHER; note = 2'-O-methyl ribonucleotide
  modified_base 31: mod_base = OTHER; note = 2'-O-methyl ribonucleotide
  modified_base 32: mod_base = OTHER; note = 2'-O-methyl ribonucleotide
  modified_base 33: mod_base = OTHER; note = 2'-O-methyl ribonucleotide
  modified_base 34: mod_base = OTHER; note = 2'-O-methyl ribonucleotide
  modified_base 35: mod_base = OTHER; note = 2'-O-methyl ribonucleotide
  modified_base 36: mod_base = OTHER; note = 2'-O-methyl ribonucleotide
  modified_base 37: mod_base = OTHER; note = 2'-O-methyl ribonucleotide
  modified_base 38: mod_base = OTHER; note = 2'-O-methyl ribonucleotide
  modified_base 39: mod_base = OTHER; note = 2'-O-methyl ribonucleotide
  modified_base 40: mod_base = OTHER; note = 2'-O-methyl ribonucleotide
  modified_base 41: mod_base = OTHER; note = 2'-O-methyl ribonucleotide
  modified_base 42: mod_base = OTHER; note = 2'-O-methyl ribonucleotide
  modified_base 46: mod_base = OTHER; note = 2'-O-methyl ribonucleotide
  modified_base 48: mod_base = OTHER; note = 2'-O-methyl ribonucleotide
  modified_base 50: mod_base = OTHER; note = 2'-O-methyl ribonucleotide
  modified_base 52: mod_base = OTHER; note = 2'-O-methyl ribonucleotide
  modified_base 53: mod_base = OTHER; note = 2'-O-methyl ribonucleotide
  modified_base 54: mod_base = OTHER; note = 2'-O-methyl ribonucleotide
  modified_base 57: mod_base = OTHER; note = 2'-O-methyl ribonucleotide
  modified_base 61: mod_base = OTHER; note = 2'-O-methyl ribonucleotide
  modified_base 66: mod_base = OTHER; note = 2'-O-methyl ribonucleotide
  modified_base 67: mod_base = OTHER; note = 2'-O-methyl ribonucleotide
  modified_base 70: mod_base = OTHER; note = 2'-O-methyl ribonucleotide
  modified_base 71: mod_base = OTHER; note = 2'-O-methyl ribonucleotide
  modified_base 72: mod_base = OTHER; note = 2'-O-methyl ribonucleotide
  modified_base 73: mod_base = OTHER; note = 2'-O-methyl ribonucleotide
  modified_base 74: mod_base = OTHER; note = 2'-O-methyl ribonucleotide
  modified_base 75: mod_base = OTHER; note = 2'-O-methyl ribonucleotide
  modified_base 76: mod_base = OTHER; note = 2'-O-methyl ribonucleotide
  modified_base 77: mod_base = OTHER; note = 2'-O-methyl ribonucleotide
  modified_base 78: mod_base = OTHER; note = 2'-O-methyl ribonucleotide
  modified_base 79: mod_base = OTHER; note = 2'-O-methyl ribonucleotide
  modified_base 80: mod_base = OTHER; note = 2'-O-methyl ribonucleotide
  modified_base 82: mod_base = OTHER; note = 2'-O-methyl ribonucleotide
  modified_base 83: mod_base = OTHER; note = 2'-O-methyl ribonucleotide
  modified_base 84: mod_base = OTHER; note = 2'-O-methyl ribonucleotide
  modified_base 85: mod_base = OTHER; note = 2'-O-methyl ribonucleotide
  modified_base 86: mod_base = OTHER; note = 2'-O-methyl ribonucleotide
  modified_base 87: mod_base = OTHER; note = 2'-O-methyl ribonucleotide
  modified_base 89: mod_base = OTHER; note = 2'-O-methyl ribonucleotide
  modified_base 92: mod_base = OTHER; note = 2'-O-methyl ribonucleotide
  modified_base 93: mod_base = OTHER; note = 2'-O-methyl ribonucleotide
  modified_base 94: mod_base = OTHER; note = 2'-O-methyl ribonucleotide
  modified_base 95: mod_base = OTHER; note = 2'-O-methyl ribonucleotide
  modified_base 96: mod_base = OTHER; note = 2'-O-methyl ribonucleotide
  modified_base 97: mod_base = OTHER; note = 2'-O-methyl ribonucleotide
  modified_base 98: mod_base = OTHER; note = 2'-O-methyl ribonucleotide
  modified_base 99: mod_base = OTHER; note = 2'-O-methyl ribonucleotide
  modified_base 100: mod_base = OTHER; note = 2'-O-methyl ribonucleotide
  modified_base 101: mod_base = OTHER; note = uniform ribonucleotides (A, C, G, inosine or U), deoxynucleotides (A, G, C, inosine or T), ribonebularine, 2'-O-methylnebularine or deoxynebularine
  modified_base 102: mod_base = OTHER; note = uniform ribonucleotides (A, C, G, inosine or U), deoxynucleotides (A, G, C, inosine or T), ribonebularine, 2'-O-methylnebularine or deoxynebularine
  modified_base 103: mod_base = OTHER; note = uniform ribonucleotides (A, C, G, inosine or U), deoxynucleotides (A, G, C, inosine or T), ribonebularine, 2'-O-methylnebularine or deoxynebularine
  modified_base 1..3: mod_base = OTHER; note = phosphorothioate linkage
  modified_base 25..26: mod_base = OTHER; note = phosphorothioate linkage
  modified_base 98..100: mod_base = OTHER; note = phosphorothioate linkage
  misc_feature 1..100: note = RNA
  misc_feature 101..103: note = Optionally DNA or RNA

SEQ ID NO: 3102 - DNA, 103 bp, synthetic construct; identical to SEQ ID NO: 1797
  source 1..103: mol_type = other DNA
  modified_base 1: mod_base = OTHER; note = 2'-O-methyl ribonucleotide
  modified_base 2: mod_base = OTHER; note = 2'-O-methyl ribonucleotide
  modified_base 3: mod_base = OTHER; note = 2'-O-methyl ribonucleotide
  modified_base 21: mod_base = OTHER; note = 2'-O-methyl ribonucleotide
  modified_base 28: mod_base = OTHER; note = 2'-O-methyl ribonucleotide
  modified_base 29: mod_base = OTHER; note = 2'-O-methyl ribonucleotide
  modified_base 30: mod_base = OTHER; note = 2'-O-methyl ribonucleotide
  modified_base 31: mod_base = OTHER; note = 2'-O-methyl ribonucleotide
  modified_base 32: mod_base = OTHER; note = 2'-O-methyl ribonucleotide
  modified_base 33: mod_base = OTHER; note = 2'-O-methyl ribonucleotide
  modified_base 34: mod_base = OTHER; note = 2'-O-methyl ribonucleotide
  modified_base 35: mod_base = OTHER; note = 2'-O-methyl ribonucleotide
  modified_base 36: mod_base = OTHER; note = 2'-O-methyl ribonucleotide
  modified_base 37: mod_base = OTHER; note = 2'-O-methyl ribonucleotide
  modified_base 38: mod_base = OTHER; note = 2'-O-methyl ribonucleotide
  modified_base 39: mod_base = OTHER; note = 2'-O-methyl ribonucleotide
  modified_base 40: mod_base = OTHER; note = 2'-O-methyl ribonucleotide
  modified_base 41: mod_base = OTHER; note = 2'-O-methyl ribonucleotide
  modified_base 42: mod_base = OTHER; note = 2'-O-methyl ribonucleotide
  modified_base 46: mod_base = OTHER; note = 2'-O-methyl ribonucleotide
  modified_base 48: mod_base = OTHER; note = 2'-O-methyl ribonucleotide
  modified_base 50: mod_base = OTHER; note = 2'-O-methyl ribonucleotide
  modified_base 52: mod_base = OTHER; note = 2'-O-methyl ribonucleotide
  modified_base 53: mod_base = OTHER; note = 2'-O-methyl ribonucleotide
  modified_base 54: mod_base = OTHER; note = 2'-O-methyl ribonucleotide
  modified_base 57: mod_base = OTHER; note = 2'-O-methyl ribonucleotide
  modified_base 61: mod_base = OTHER; note = 2'-O-methyl ribonucleotide
  modified_base 66: mod_base = OTHER; note = 2'-O-methyl ribonucleotide
  modified_base 67: mod_base = OTHER; note = 2'-O-methyl ribonucleotide
  modified_base 70: mod_base = OTHER; note = 2'-O-methyl ribonucleotide
  modified_base 71: mod_base = OTHER; note = 2'-O-methyl ribonucleotide
  modified_base 72: mod_base = OTHER; note = 2'-O-methyl ribonucleotide
  modified_base 73: mod_base = OTHER; note = 2'-O-methyl ribonucleotide
  modified_base 74: mod_base = OTHER; note = 2'-O-methyl ribonucleotide
  modified_base 75: mod_base = OTHER; note = 2'-O-methyl ribonucleotide
  modified_base 76: mod_base = OTHER; note = 2'-O-methyl ribonucleotide
  modified_base 77: mod_base = OTHER; note = 2'-O-methyl ribonucleotide
  modified_base 78: mod_base = OTHER; note = 2'-O-methyl ribonucleotide
  modified_base 79: mod_base = OTHER; note = 2'-O-methyl ribonucleotide
  modified_base 80: mod_base = OTHER; note = 2'-O-methyl ribonucleotide
  modified_base 82: mod_base = OTHER; note = 2'-O-methyl ribonucleotide
  modified_base 83: mod_base = OTHER; note = 2'-O-methyl ribonucleotide
  modified_base 84: mod_base = OTHER; note = 2'-O-methyl ribonucleotide
  modified_base 85: mod_base = OTHER; note = 2'-O-methyl ribonucleotide
  modified_base 86: mod_base = OTHER; note = 2'-O-methyl ribonucleotide
  modified_base 87: mod_base = OTHER; note = 2'-O-methyl ribonucleotide
  modified_base 89: mod_base = OTHER; note = 2'-O-methyl ribonucleotide
  modified_base 91: mod_base = OTHER; note = 2'-O-methyl ribonucleotide
  modified_base 92: mod_base = OTHER; note = 2'-O-methyl ribonucleotide
  modified_base 93: mod_base = OTHER; note = 2'-O-methyl ribonucleotide
  modified_base 94: mod_base = OTHER; note = 2'-O-methyl ribonucleotide
  modified_base 95: mod_base = OTHER; note = 2'-O-methyl ribonucleotide
  modified_base 96: mod_base = OTHER; note = 2'-O-methyl ribonucleotide
  modified_base 97: mod_base = OTHER; note = 2'-O-methyl ribonucleotide
  modified_base 98: mod_base = OTHER; note = 2'-O-methyl ribonucleotide
  modified_base 99: mod_base = OTHER; note = 2'-O-methyl ribonucleotide
  modified_base 100: mod_base = OTHER; note = 2'-O-methyl ribonucleotide
  modified_base 101: mod_base = OTHER; note = uniform ribonucleotides (A, C, G, inosine or U), deoxynucleotides (A, G, C, inosine or T), ribonebularine, 2'-O-methylnebularine or deoxynebularine
  modified_base 102: mod_base = OTHER; note = uniform ribonucleotides (A, C, G, inosine or U), deoxynucleotides (A, G, C, inosine or T), ribonebularine, 2'-O-methylnebularine or deoxynebularine
  modified_base 103: mod_base = OTHER; note = uniform ribonucleotides (A, C, G, inosine or U), deoxynucleotides (A, G, C, inosine or T), ribonebularine, 2'-O-methylnebularine or deoxynebularine
  modified_base 1..3: mod_base = OTHER; note = phosphorothioate linkage
  modified_base 25..26: mod_base = OTHER; note = phosphorothioate linkage
  modified_base 98..100: mod_base = OTHER; note = phosphorothioate linkage
  misc_feature 1..100: note = RNA
  misc_feature 101..103: note = Optionally DNA or RNA

SEQ ID NO: 3103 - DNA, 103 bp, synthetic construct; identical to SEQ ID NO: 1797
  source 1..103: mol_type = other DNA
  modified_base 1: mod_base = OTHER; note = 2'-O-methyl ribonucleotide
  modified_base 2: mod_base = OTHER; note = 2'-O-methyl ribonucleotide
  modified_base 3: mod_base = OTHER; note = 2'-O-methyl ribonucleotide
  modified_base 21: mod_base = OTHER; note = 2'-O-methyl ribonucleotide
  modified_base 28: mod_base = OTHER; note = 2'-O-methyl ribonucleotide
  modified_base 29: mod_base = OTHER; note = 2'-O-methyl ribonucleotide
  modified_base 30: mod_base = OTHER; note = 2'-O-methyl ribonucleotide
  modified_base 31: mod_base = OTHER; note = 2'-O-methyl ribonucleotide
  modified_base 32: mod_base = OTHER; note = 2'-O-methyl ribonucleotide
  modified_base 34: mod_base = OTHER; note = 2'-O-methyl ribonucleotide
  modified_base 35: mod_base = OTHER; note = 2'-O-methyl ribonucleotide
  modified_base 36: mod_base = OTHER; note = 2'-O-methyl ribonucleotide
  modified_base 37: mod_base = OTHER; note = 2'-O-methyl ribonucleotide
  modified_base 38: mod_base = OTHER; note = 2'-O-methyl ribonucleotide
  modified_base 39: mod_base = OTHER; note = 2'-O-methyl ribonucleotide
  modified_base 40: mod_base = OTHER; note = 2'-O-methyl ribonucleotide
  modified_base 41: mod_base = OTHER; note = 2'-O-methyl ribonucleotide
  modified_base 42: mod_base = OTHER; note = 2'-O-methyl ribonucleotide
  modified_base 46: mod_base = OTHER; note = 2'-O-methyl ribonucleotide
  modified_base 48: mod_base = OTHER; note = 2'-O-methyl ribonucleotide
  modified_base 50: mod_base = OTHER; note = 2'-O-methyl ribonucleotide
  modified_base 52: mod_base = OTHER; note = 2'-O-methyl ribonucleotide
  modified_base 53: mod_base = OTHER; note = 2'-O-methyl ribonucleotide
  modified_base 54: mod_base = OTHER; note = 2'-O-methyl ribonucleotide
  modified_base 57: mod_base = OTHER; note = 2'-O-methyl ribonucleotide
  modified_base 61: mod_base = OTHER; note = 2'-O-methyl ribonucleotide
  modified_base 66: mod_base = OTHER; note = 2'-O-methyl ribonucleotide
  modified_base 67: mod_base = OTHER; note = 2'-O-methyl ribonucleotide
  modified_base 70: mod_base = OTHER; note = 2'-O-methyl ribonucleotide
  modified_base 71: mod_base = OTHER; note = 2'-O-methyl ribonucleotide
  modified_base 72: mod_base = OTHER; note = 2'-O-methyl ribonucleotide
  modified_base 73: mod_base = OTHER; note = 2'-O-methyl ribonucleotide
  modified_base 74: mod_base = OTHER; note = 2'-O-methyl ribonucleotide
  modified_base 75: mod_base = OTHER; note = 2'-O-methyl ribonucleotide
  modified_base 76: mod_base = OTHER; note = 2'-O-methyl ribonucleotide
  modified_base 77: mod_base = OTHER; note = 2'-O-methyl ribonucleotide
  modified_base 78: mod_base = OTHER; note = 2'-O-methyl ribonucleotide
  modified_base 79: mod_base = OTHER; note = 2'-O-methyl ribonucleotide
  modified_base 80: mod_base = OTHER; note = 2'-O-methyl ribonucleotide
  modified_base 82: mod_base = OTHER; note = 2'-O-methyl ribonucleotide
  modified_base 83: mod_base = OTHER; note = 2'-O-methyl ribonucleotide
  modified_base 84: mod_base = OTHER; note = 2'-O-methyl ribonucleotide
  modified_base 85: mod_base = OTHER; note = 2'-O-methyl ribonucleotide
  modified_base 86: mod_base = OTHER; note = 2'-O-methyl ribonucleotide
  modified_base 87: mod_base = OTHER; note = 2'-O-methyl ribonucleotide
  modified_base 89: mod_base = OTHER; note = 2'-O-methyl ribonucleotide
  modified_base 91: mod_base = OTHER; note = 2'-O-methyl ribonucleotide
  modified_base 92: mod_base = OTHER; note = 2'-O-methyl ribonucleotide
  modified_base 93: mod_base = OTHER; note = 2'-O-methyl ribonucleotide
  modified_base 94: mod_base = OTHER; note = 2'-O-methyl ribonucleotide
  modified_base 95: mod_base = OTHER; note = 2'-O-methyl ribonucleotide
  modified_base 96: mod_base = OTHER; note = 2'-O-methyl ribonucleotide
  modified_base 97: mod_base = OTHER; note = 2'-O-methyl ribonucleotide
  modified_base 98: mod_base = OTHER; note = 2'-O-methyl ribonucleotide
  modified_base 99: mod_base = OTHER; note = 2'-O-methyl ribonucleotide
  modified_base 100: mod_base = OTHER; note = 2'-O-methyl ribonucleotide
  modified_base 101: mod_base = OTHER; note = uniform ribonucleotides (A, C, G, inosine or U), deoxynucleotides (A, G, C, inosine or T), ribonebularine, 2'-O-methylnebularine or deoxynebularine
  modified_base 102: mod_base = OTHER; note = uniform ribonucleotides (A, C, G, inosine or U), deoxynucleotides (A, G, C, inosine or T), ribonebularine, 2'-O-methylnebularine or deoxynebularine
  modified_base 103: mod_base = OTHER; note = uniform ribonucleotides (A, C, G, inosine or U), deoxynucleotides (A, G, C, inosine or T), ribonebularine, 2'-O-methylnebularine or deoxynebularine
  modified_base 1..3: mod_base = OTHER; note = phosphorothioate linkage
  modified_base 25..26: mod_base = OTHER; note = phosphorothioate linkage
  modified_base 98..100: mod_base = OTHER; note = phosphorothioate linkage
  misc_feature 1..100: note = RNA
  misc_feature 101..103: note = Optionally DNA or RNA

SEQ ID NO: 3104 - DNA, 103 bp, synthetic construct; identical to SEQ ID NO: 1797
  source 1..103: mol_type = other DNA
  modified_base 1: mod_base = OTHER; note = 2'-O-methyl ribonucleotide
  modified_base 2: mod_base = OTHER; note = 2'-O-methyl ribonucleotide
  modified_base 3: mod_base = OTHER; note = 2'-O-methyl ribonucleotide
  modified_base 21: mod_base = OTHER; note = 2'-O-methyl ribonucleotide
  modified_base 28: mod_base = OTHER; note = 2'-O-methyl ribonucleotide
  modified_base 29: mod_base = OTHER; note = 2'-O-methyl ribonucleotide
  modified_base 30: mod_base = OTHER; note = 2'-O-methyl ribonucleotide
  modified_base 31: mod_base = OTHER; note = 2'-O-methyl ribonucleotide
  modified_base 32: mod_base = OTHER; note = 2'-O-methyl ribonucleotide
  modified_base 34: mod_base = OTHER; note = 2'-O-methyl ribonucleotide
  modified_base 35: mod_base = OTHER; note = 2'-O-methyl ribonucleotide
  modified_base 36: mod_base = OTHER; note = 2'-O-methyl ribonucleotide
  modified_base 37: mod_base = OTHER; note = 2'-O-methyl ribonucleotide
  modified_base 38: mod_base = OTHER; note = 2'-O-methyl ribonucleotide
  modified_base 39: mod_base = OTHER; note = 2'-O-methyl ribonucleotide
  modified_base 40: mod_base = OTHER; note = 2'-O-methyl ribonucleotide
  modified_base 41: mod_base = OTHER; note = 2'-O-methyl ribonucleotide
  modified_base 42: mod_base = OTHER; note = 2'-O-methyl ribonucleotide
  modified_base 46: mod_base = OTHER; note = 2'-O-methyl ribonucleotide
  modified_base 48: mod_base = OTHER; note = 2'-O-methyl ribonucleotide
  modified_base 50: mod_base = OTHER; note = 2'-O-methyl ribonucleotide
  modified_base 52: mod_base = OTHER; note = 2'-O-methyl ribonucleotide
  modified_base 53: mod_base = OTHER; note = 2'-O-methyl ribonucleotide
  modified_base 54: mod_base = OTHER; note = 2'-O-methyl ribonucleotide
  modified_base 55: mod_base = OTHER; note = 2'-O-methyl ribonucleotide
  modified_base 56: mod_base = OTHER; note = 2'-O-methyl ribonucleotide
  modified_base 57: mod_base = OTHER; note = 2'-O-methyl ribonucleotide
  modified_base 60: mod_base = OTHER; note = 2'-O-methyl ribonucleotide
  modified_base 61: mod_base = OTHER; note = 2'-O-methyl ribonucleotide
  modified_base 66: mod_base = OTHER; note = 2'-O-methyl ribonucleotide
  modified_base 67: mod_base = OTHER; note = 2'-O-methyl ribonucleotide
  modified_base 70: mod_base = OTHER; note = 2'-O-methyl ribonucleotide
  modified_base 71: mod_base = OTHER; note = 2'-O-methyl ribonucleotide
  modified_base 72: mod_base = OTHER; note = 2'-O-methyl ribonucleotide
  modified_base 74: mod_base = OTHER; note = 2'-O-methyl ribonucleotide
  modified_base 75: mod_base = OTHER; note = 2'-O-methyl ribonucleotide
  modified_base 76: mod_base = OTHER; note = 2'-O-methyl ribonucleotide
  modified_base 77: mod_base = OTHER; note = 2'-O-methyl ribonucleotide
  modified_base 78: mod_base = OTHER; note = 2'-O-methyl ribonucleotide
  modified_base 79: mod_base = OTHER; note = 2'-O-methyl ribonucleotide
  modified_base 80: mod_base = OTHER; note = 2'-O-methyl ribonucleotide
  modified_base 82: mod_base = OTHER; note = 2'-O-methyl ribonucleotide
  modified_base 83: mod_base = OTHER; note = 2'-O-methyl ribonucleotide
  modified_base 84: mod_base = OTHER; note = 2'-O-methyl ribonucleotide
  modified_base 85: mod_base = OTHER; note = 2'-O-methyl ribonucleotide
  modified_base 86: mod_base = OTHER; note = 2'-O-methyl ribonucleotide
  modified_base 87: mod_base = OTHER; note = 2'-O-methyl ribonucleotide
  modified_base 89: mod_base = OTHER; note = 2'-O-methyl ribonucleotide
  modified_base 92: mod_base = OTHER; note = 2'-O-methyl ribonucleotide
  modified_base 93: mod_base = OTHER; note = 2'-O-methyl ribonucleotide
  modified_base 94: mod_base = OTHER; note = 2'-O-methyl ribonucleotide
  modified_base 95: mod_base = OTHER; note = 2'-O-methyl ribonucleotide
  modified_base 96: mod_base = OTHER; note = 2'-O-methyl ribonucleotide
  modified_base 97: mod_base = OTHER; note = 2'-O-methyl ribonucleotide
  modified_base 98: mod_base = OTHER; note = 2'-O-methyl ribonucleotide
  modified_base 99: mod_base = OTHER; note = 2'-O-methyl ribonucleotide
  modified_base 100: mod_base = OTHER; note = 2'-O-methyl ribonucleotide
  modified_base 101: mod_base = OTHER; note = uniform ribonucleotides (A, C, G, inosine or U), deoxynucleotides (A, G, C, inosine or T), ribonebularine, 2'-O-methylnebularine or deoxynebularine
  modified_base 102: mod_base = OTHER; note = uniform ribonucleotides (A, C, G, inosine or U), deoxynucleotides (A, G, C, inosine or T), ribonebularine, 2'-O-methylnebularine or deoxynebularine
  modified_base 103: mod_base = OTHER; note = uniform ribonucleotides (A, C, G, inosine or U), deoxynucleotides (A, G, C, inosine or T), ribonebularine, 2'-O-methylnebularine or deoxynebularine
  modified_base 1..3: mod_base = OTHER; note = phosphorothioate linkage
  modified_base 25..26: mod_base = OTHER; note = phosphorothioate linkage
  modified_base 98..100: mod_base = OTHER; note = phosphorothioate linkage
  misc_feature 1..100: note = RNA
  misc_feature 101..103: note = Optionally DNA or RNA

SEQ ID NO: 3105 - DNA, 103 bp, synthetic construct; identical to SEQ ID NO: 1795
  source 1..103: mol_type = other DNA
  modified_base 1: mod_base = OTHER; note = 2'-O-methyl ribonucleotide
  modified_base 2: mod_base = OTHER; note = 2'-O-methyl ribonucleotide
  modified_base 3: mod_base = OTHER; note = 2'-O-methyl ribonucleotide
  modified_base 21: mod_base = OTHER; note = 2'-O-methyl ribonucleotide
  modified_base 28: mod_base = OTHER; note = 2'-O-methyl ribonucleotide
  modified_base 29: mod_base = OTHER; note = 2'-O-methyl ribonucleotide
  modified_base 30: mod_base = OTHER; note = 2'-O-methyl ribonucleotide
  modified_base 31: mod_base = OTHER; note = 2'-O-methyl ribonucleotide
  modified_base 32: mod_base = OTHER; note = 2'-O-methyl ribonucleotide
  modified_base 33: mod_base = OTHER; note = 2'-O-methyl ribonucleotide
  modified_base 34: mod_base = OTHER; note = 2'-O-methyl ribonucleotide
  modified_base 35: mod_base = OTHER; note = 2'-O-methyl ribonucleotide
  modified_base 36: mod_base = OTHER; note = 2'-O-methyl ribonucleotide
  modified_base 37: mod_base = OTHER; note = 2'-O-methyl ribonucleotide
  modified_base 38: mod_base = OTHER; note = 2'-O-methyl ribonucleotide
  modified_base 39: mod_base = OTHER; note = 2'-O-methyl ribonucleotide
  modified_base 40: mod_base = OTHER; note = 2'-O-methyl ribonucleotide
  modified_base 41: mod_base = OTHER; note = 2'-O-methyl ribonucleotide
  modified_base 42: mod_base = OTHER; note = 2'-O-methyl ribonucleotide
  modified_base 46: mod_base = OTHER; note = 2'-O-methyl ribonucleotide
  modified_base 48: mod_base = OTHER; note = 2'-O-methyl ribonucleotide
  modified_base 50: mod_base = OTHER; note = 2'-O-methyl ribonucleotide
  modified_base 52: mod_base = OTHER; note = 2'-O-methyl ribonucleotide
  modified_base 53: mod_base = OTHER; note = 2'-O-methyl ribonucleotide
  modified_base 54: mod_base = OTHER; note = 2'-O-methyl ribonucleotide
  modified_base 55: mod_base = OTHER; note = 2'-O-methyl ribonucleotide
  modified_base 56: mod_base = OTHER; note = 2'-O-methyl ribonucleotide
  modified_base 57: mod_base = OTHER; note = 2'-O-methyl ribonucleotide
  modified_base 60: mod_base = OTHER; note = 2'-O-methyl ribonucleotide
  modified_base 61: mod_base = OTHER; note = 2'-O-methyl ribonucleotide
  modified_base 66: mod_base = OTHER; note = 2'-O-methyl ribonucleotide
  modified_base 67: mod_base = OTHER; note = 2'-O-methyl ribonucleotide
  modified_base 70: mod_base = OTHER; note = 2'-O-methyl ribonucleotide
  modified_base 71: mod_base = OTHER; note = 2'-O-methyl ribonucleotide
  modified_base 72: mod_base = OTHER; note = 2'-O-methyl ribonucleotide
  modified_base 73: mod_base = OTHER; note = 2'-O-methyl ribonucleotide
  modified_base 74: mod_base = OTHER; note = 2'-O-methyl ribonucleotide
  modified_base 75: mod_base = OTHER; note = 2'-O-methyl ribonucleotide
  modified_base 76: mod_base = OTHER; note = 2'-O-methyl ribonucleotide
  modified_base 77: mod_base = OTHER; note = 2'-O-methyl ribonucleotide
  modified_base 78: mod_base = OTHER; note = 2'-O-methyl ribonucleotide
  modified_base 79: mod_base = OTHER; note = 2'-O-methyl ribonucleotide
  modified_base 80: mod_base = OTHER; note = 2'-O-methyl ribonucleotide
  modified_base 81: mod_base = OTHER; note = 2'-O-methyl ribonucleotide
  modified_base 83: mod_base = OTHER; note = 2'-O-methyl ribonucleotide
  modified_base 84: mod_base = OTHER; note = 2'-O-methyl ribonucleotide
  modified_base 85: mod_base = OTHER; note = 2'-O-methyl ribonucleotide
  modified_base 86: mod_base = OTHER; note = 2'-O-methyl ribonucleotide
  modified_base 87: mod_base = OTHER; note = 2'-O-methyl ribonucleotide
  modified_base 88: mod_base = OTHER; note = 2'-O-methyl ribonucleotide
  modified_base 89: mod_base = OTHER; note = 2'-O-methyl ribonucleotide
  modified_base 90: mod_base = OTHER; note = 2'-O-methyl ribonucleotide
  modified_base 91: mod_base = OTHER; note = 2'-O-methyl ribonucleotide
  modified_base 92: mod_base = OTHER; note = 2'-O-methyl ribonucleotide
  modified_base 93: mod_base = OTHER; note = 2'-O-methyl ribonucleotide
  modified_base 94: mod_base = OTHER; note = 2'-O-methyl ribonucleotide
  modified_base 95: mod_base = OTHER; note = 2'-O-methyl ribonucleotide
  modified_base 96: mod_base = OTHER; note = 2'-O-methyl ribonucleotide
  modified_base 97: mod_base = OTHER; note = 2'-O-methyl ribonucleotide
  modified_base 98: mod_base = OTHER; note = 2'-O-methyl ribonucleotide
  modified_base 99: mod_base = OTHER; note = 2'-O-methyl ribonucleotide
  modified_base 100: mod_base = OTHER; note = 2'-O-methyl ribonucleotide
  modified_base 101: mod_base = OTHER; note = uniform ribonucleotides (A, C, G, inosine or U), deoxynucleotides (A, G, C, inosine or T), ribonebularine, 2'-O-methylnebularine or deoxynebularine
  modified_base 102: mod_base = OTHER; note = uniform ribonucleotides (A, C, G, inosine or U), deoxynucleotides (A, G, C, inosine or T), ribonebularine, 2'-O-methylnebularine or deoxynebularine
  modified_base 103: mod_base = OTHER; note = uniform ribonucleotides (A, C, G, inosine or U), deoxynucleotides (A, G, C, inosine or T), ribonebularine, 2'-O-methylnebularine or deoxynebularine
  modified_base 1..3: mod_base = OTHER; note = phosphorothioate linkage
  modified_base 45..46: mod_base = OTHER; note = phosphorothioate linkage
  modified_base 64..65: mod_base = OTHER; note = phosphorothioate linkage
  modified_base 98..100: mod_base = OTHER; note = phosphorothioate linkage
  misc_feature 1..100: note = RNA
  misc_feature 101..103: note = Optionally DNA or RNA

SEQ ID NO: 3106 - DNA, 103 bp, synthetic construct; identical to SEQ ID NO: 1795
  source 1..103: mol_type = other DNA
  modified_base 1: mod_base = OTHER; note = 2'-O-methyl ribonucleotide
  modified_base 2: mod_base = OTHER; note = 2'-O-methyl ribonucleotide
  modified_base 3: mod_base = OTHER; note = 2'-O-methyl ribonucleotide
  modified_base 21: mod_base = OTHER; note = 2'-O-methyl ribonucleotide
  modified_base 28: mod_base = OTHER; note = 2'-O-methyl ribonucleotide
  modified_base 29: mod_base = OTHER; note = 2'-O-methyl ribonucleotide
  modified_base 30: mod_base = OTHER; note = 2'-O-methyl ribonucleotide
  modified_base 31: mod_base = OTHER; note = 2'-O-methyl ribonucleotide
  modified_base 32: mod_base = OTHER; note = 2'-O-methyl ribonucleotide
  modified_base 34: mod_base = OTHER; note = 2'-O-methyl ribonucleotide
  modified_base 35: mod_base = OTHER; note = 2'-O-methyl ribonucleotide
  modified_base 36: mod_base = OTHER; note = 2'-O-methyl ribonucleotide
  modified_base 37: mod_base = OTHER; note = 2'-O-methyl ribonucleotide
  modified_base 38: mod_base = OTHER; note = 2'-O-methyl ribonucleotide
  modified_base 39: mod_base = OTHER; note = 2'-O-methyl ribonucleotide
  modified_base 40: mod_base = OTHER; note = 2'-O-methyl ribonucleotide
  modified_base 41: mod_base = OTHER; note = 2'-O-methyl ribonucleotide
  modified_base 42: mod_base = OTHER; note = 2'-O-methyl ribonucleotide
  modified_base 46: mod_base = OTHER; note = 2'-O-methyl ribonucleotide
  modified_base 48: mod_base = OTHER; note = 2'-O-methyl ribonucleotide
  modified_base 50: mod_base = OTHER; note = 2'-O-methyl ribonucleotide
  modified_base 52: mod_base = OTHER; note = 2'-O-methyl ribonucleotide
  modified_base 53: mod_base = OTHER; note = 2'-O-methyl ribonucleotide
  modified_base 54: mod_base = OTHER; note = 2'-O-methyl ribonucleotide
  modified_base 55: mod_base = OTHER; note = 2'-O-methyl ribonucleotide
  modified_base 56: mod_base = OTHER; note = 2'-O-methyl ribonucleotide
  modified_base 57: mod_base = OTHER; note = 2'-O-methyl ribonucleotide
  modified_base 60: mod_base = OTHER; note = 2'-O-methyl ribonucleotide
  modified_base 61: mod_base = OTHER; note = 2'-O-methyl ribonucleotide
  modified_base 66: mod_base = OTHER; note = 2'-O-methyl ribonucleotide
  modified_base 67: mod_base = OTHER; note = 2'-O-methyl ribonucleotide
  modified_base 70: mod_base = OTHER; note = 2'-O-methyl ribonucleotide
  modified_base 71: mod_base = OTHER; note = 2'-O-methyl ribonucleotide
  modified_base 72: mod_base = OTHER; note = 2'-O-methyl ribonucleotide
  modified_base 74: mod_base = OTHER; note = 2'-O-methyl ribonucleotide
  modified_base 75: mod_base = OTHER; note = 2'-O-methyl ribonucleotide
  modified_base 76: mod_base = OTHER; note = 2'-O-methyl ribonucleotide
  modified_base 77: mod_base = OTHER; note = 2'-O-methyl ribonucleotide
  modified_base 78: mod_base = OTHER; note = 2'-O-methyl ribonucleotide
  modified_base 79: mod_base = OTHER; note = 2'-O-methyl ribonucleotide
  modified_base 80: mod_base = OTHER; note = 2'-O-methyl ribonucleotide
  modified_base 81: mod_base = OTHER; note = 2'-O-methyl ribonucleotide
  modified_base 83: mod_base = OTHER; note = 2'-O-methyl ribonucleotide
  modified_base 84: mod_base = OTHER; note = 2'-O-methyl ribonucleotide
  modified_base 85: mod_base = OTHER; note = 2'-O-methyl ribonucleotide
  modified_base 86: mod_base = OTHER; note = 2'-O-methyl ribonucleotide
  modified_base 87: mod_base = OTHER; note = 2'-O-methyl ribonucleotide
  modified_base 88: mod_base = OTHER; note = 2'-O-methyl ribonucleotide
  modified_base 89: mod_base = OTHER; note = 2'-O-methyl ribonucleotide
  modified_base 90: mod_base = OTHER; note = 2'-O-methyl ribonucleotide
  modified_base 91: mod_base = OTHER; note = 2'-O-methyl ribonucleotide
  modified_base 92: mod_base = OTHER; note = 2'-O-methyl ribonucleotide
  modified_base 93: mod_base = OTHER; note = 2'-O-methyl ribonucleotide
  modified_base 94: mod_base = OTHER; note = 2'-O-methyl ribonucleotide
  modified_base 95: mod_base = OTHER; note = 2'-O-methyl ribonucleotide
  modified_base 96: mod_base = OTHER; note = 2'-O-methyl ribonucleotide
  modified_base 97: mod_base = OTHER; note = 2'-O-methyl ribonucleotide
  modified_base 98: mod_base = OTHER; note = 2'-O-methyl ribonucleotide
  modified_base 99: mod_base = OTHER; note = 2'-O-methyl ribonucleotide
  modified_base 100: mod_base = OTHER; note = 2'-O-methyl ribonucleotide
  modified_base 101: mod_base = OTHER; note = uniform ribonucleotides (A, C, G, inosine or U), deoxynucleotides (A, G, C, inosine or T), ribonebularine, 2'-O-methylnebularine or deoxynebularine
  modified_base 102: mod_base = OTHER; note = uniform ribonucleotides (A, C, G, inosine or U), deoxynucleotides (A, G, C, inosine or T), ribonebularine, 2'-O-methylnebularine or deoxynebularine
  modified_base 103: mod_base = OTHER; note = uniform ribonucleotides (A, C, G, inosine or U), deoxynucleotides (A, G, C, inosine or T), ribonebularine, 2'-O-methylnebularine or deoxynebularine
  modified_base 1..3: mod_base = OTHER; note = phosphorothioate linkage
  modified_base 45..46: mod_base = OTHER; note = phosphorothioate linkage
  modified_base 64..65: mod_base = OTHER; note = phosphorothioate linkage
  modified_base 98..100: mod_base = OTHER; note = phosphorothioate linkage
  misc_feature 1..100: note = RNA
  misc_feature 101..103: note = Optionally DNA or RNA

SEQ ID NO: 3107 - DNA, 103 bp, synthetic construct; identical to SEQ ID NO: 1796
  source 1..103: mol_type = other DNA
  modified_base 1: mod_base = OTHER; note = 2'-O-methyl ribonucleotide
  modified_base 2: mod_base = OTHER; note = 2'-O-methyl ribonucleotide
  modified_base 3: mod_base = OTHER; note = 2'-O-methyl ribonucleotide
  modified_base 21: mod_base = OTHER; note = 2'-O-methyl ribonucleotide
  modified_base 28: mod_base = OTHER; note = 2'-O-methyl ribonucleotide
  modified_base 29: mod_base = OTHER; note = 2'-O-methyl ribonucleotide
  modified_base 30: mod_base = OTHER; note = 2'-O-methyl ribonucleotide
  modified_base 31: mod_base = OTHER; note = 2'-O-methyl ribonucleotide
  modified_base 32: mod_base = OTHER; note = 2'-O-methyl ribonucleotide
  modified_base 33: mod_base = OTHER; note = 2'-O-methyl ribonucleotide
  modified_base 34: mod_base = OTHER; note = 2'-O-methyl ribonucleotide
  modified_base 35: mod_base = OTHER; note = 2'-O-methyl ribonucleotide
  modified_base 36: mod_base = OTHER; note = 2'-O-methyl ribonucleotide
  modified_base 37: mod_base = OTHER; note = 2'-O-methyl ribonucleotide
  modified_base 38: mod_base = OTHER; note = 2'-O-methyl ribonucleotide
  modified_base 39: mod_base = OTHER; note = 2'-O-methyl ribonucleotide
  modified_base 40: mod_base = OTHER; note = 2'-O-methyl ribonucleotide
  modified_base 41: mod_base = OTHER; note = 2'-O-methyl ribonucleotide
  modified_base 42: mod_base = OTHER; note = 2'-O-methyl ribonucleotide
  modified_base 46: mod_base = OTHER; note = 2'-O-methyl ribonucleotide
  modified_base 48: mod_base = OTHER; note = 2'-O-methyl ribonucleotide
  modified_base 50: mod_base = OTHER; note = 2'-O-methyl ribonucleotide
  modified_base 52: mod_base = OTHER; note = 2'-O-methyl ribonucleotide
  modified_base 53: mod_base = OTHER; note = 2'-O-methyl ribonucleotide
  modified_base 54: mod_base = OTHER; note = 2'-O-methyl ribonucleotide
  modified_base 55: mod_base = OTHER; note = 2'-O-methyl ribonucleotide
  modified_base 56: mod_base = OTHER; note = 2'-O-methyl ribonucleotide
  modified_base 57: mod_base = OTHER; note = 2'-O-methyl ribonucleotide
  modified_base 60: mod_base = OTHER; note = 2'-O-methyl ribonucleotide
  modified_base 61: mod_base = OTHER; note = 2'-O-methyl ribonucleotide
  modified_base 66: mod_base = OTHER; note = 2'-O-methyl ribonucleotide
  modified_base 67: mod_base = OTHER; note = 2'-O-methyl ribonucleotide
  modified_base 70: mod_base = OTHER; note = 2'-O-methyl ribonucleotide
  modified_base 71: mod_base = OTHER; note = 2'-O-methyl ribonucleotide
  modified_base 72: mod_base = OTHER; note = 2'-O-methyl ribonucleotide
  modified_base 73: mod_base = OTHER; note = 2'-O-methyl ribonucleotide
  modified_base 74: mod_base = OTHER; note = 2'-O-methyl ribonucleotide
  modified_base 75: mod_base = OTHER; note = 2'-O-methyl ribonucleotide
  modified_base 76: mod_base = OTHER; note = 2'-O-methyl ribonucleotide
  modified_base 77: mod_base = OTHER; note = 2'-O-methyl ribonucleotide
  modified_base 78: mod_base = OTHER; note = 2'-O-methyl ribonucleotide
  modified_base 79: mod_base = OTHER; note = 2'-O-methyl ribonucleotide
  modified_base 80: mod_base = OTHER; note = 2'-O-methyl ribonucleotide
  modified_base 81: mod_base = OTHER; note = 2'-O-methyl ribonucleotide
  modified_base 83: mod_base = OTHER; note = 2'-O-methyl ribonucleotide
  modified_base 84: mod_base = OTHER; note = 2'-O-methyl ribonucleotide
  modified_base 85: mod_base = OTHER; note = 2'-O-methyl ribonucleotide
  modified_base 86: mod_base = OTHER; note = 2'-O-methyl ribonucleotide
  modified_base 87: mod_base = OTHER; note = 2'-O-methyl ribonucleotide
  modified_base 88: mod_base = OTHER; note = 2'-O-methyl ribonucleotide
  modified_base 89: mod_base = OTHER; note = 2'-O-methyl ribonucleotide
  modified_base 90: mod_base = OTHER; note = 2'-O-methyl ribonucleotide
  modified_base 91: mod_base = OTHER; note = 2'-O-methyl ribonucleotide
  modified_base 92: mod_base = OTHER; note = 2'-O-methyl ribonucleotide
  modified_base 93: mod_base = OTHER; note = 2'-O-methyl ribonucleotide
  modified_base 94: mod_base = OTHER; note = 2'-O-methyl ribonucleotide
  modified_base 95: mod_base = OTHER; note = 2'-O-methyl ribonucleotide
  modified_base 96: mod_base = OTHER; note = 2'-O-methyl ribonucleotide
  modified_base 97: mod_base = OTHER; note = 2'-O-methyl ribonucleotide
  modified_base 98: mod_base = OTHER; note = 2'-O-methyl ribonucleotide
  modified_base 99: mod_base = OTHER; note = 2'-O-methyl ribonucleotide
  modified_base 100: mod_base = OTHER; note = 2'-O-methyl ribonucleotide
  modified_base 101: mod_base = OTHER; note = uniform ribonucleotides (A, C, G, inosine or U), deoxynucleotides (A, G, C, inosine or T), ribonebularine, 2'-O-methylnebularine or deoxynebularine
  modified_base 102: mod_base = OTHER; note = uniform ribonucleotides (A, C, G, inosine or U), deoxynucleotides (A, G, C, inosine or T), ribonebularine, 2'-O-methylnebularine or deoxynebularine
  modified_base 103: mod_base = OTHER; note = uniform ribonucleotides (A, C, G, inosine or U), deoxynucleotides (A, G, C, inosine or T), ribonebularine, 2'-O-methylnebularine or deoxynebularine
  modified_base 1..3: mod_base = OTHER; note = phosphorothioate linkage
  modified_base 45..46: mod_base = OTHER; note = phosphorothioate linkage
  modified_base 64..65: mod_base = OTHER; note = phosphorothioate linkage
  modified_base 98..100: mod_base = OTHER; note = phosphorothioate linkage
  misc_feature 1..100: note = RNA
  misc_feature 101..103: note = Optionally DNA or RNA

SEQ ID NO: 3108 - DNA, 103 bp, synthetic construct; identical to SEQ ID NO: 1796
  source 1..103: mol_type = other DNA
  modified_base 1: mod_base = OTHER; note = 2'-O-methyl ribonucleotide
  modified_base 2: mod_base = OTHER; note = 2'-O-methyl ribonucleotide
  modified_base 3: mod_base = OTHER; note = 2'-O-methyl ribonucleotide
  modified_base 21: mod_base = OTHER; note = 2'-O-methyl ribonucleotide
  modified_base 28: mod_base = OTHER; note = 2'-O-methyl ribonucleotide
  modified_base 29: mod_base = OTHER; note = 2'-O-methyl ribonucleotide
  modified_base 30: mod_base = OTHER; note = 2'-O-methyl ribonucleotide
  modified_base 31: mod_base = OTHER; note = 2'-O-methyl ribonucleotide
  modified_base 32: mod_base = OTHER; note = 2'-O-methyl ribonucleotide
  modified_base 34: mod_base = OTHER; note = 2'-O-methyl ribonucleotide
  modified_base 35: mod_base = OTHER; note = 2'-O-methyl ribonucleotide
  modified_base 36: mod_base = OTHER; note = 2'-O-methyl ribonucleotide
  modified_base 37: mod_base = OTHER; note = 2'-O-methyl ribonucleotide
  modified_base 38: mod_base = OTHER; note = 2'-O-methyl ribonucleotide
  modified_base 39: mod_base = OTHER; note = 2'-O-methyl ribonucleotide
  modified_base 40: mod_base = OTHER; note = 2'-O-methyl ribonucleotide
  modified_base 41: mod_base = OTHER; note = 2'-O-methyl ribonucleotide
  modified_base 42: mod_base = OTHER; note = 2'-O-methyl ribonucleotide
  modified_base 46: mod_base = OTHER; note = 2'-O-methyl ribonucleotide
  modified_base 48: mod_base = OTHER; note = 2'-O-methyl ribonucleotide
  modified_base 50: mod_base = OTHER; note = 2'-O-methyl ribonucleotide
  modified_base 52: mod_base = OTHER; note = 2'-O-methyl ribonucleotide
  modified_base 53: mod_base = OTHER; note = 2'-O-methyl ribonucleotide
  modified_base 54: mod_base = OTHER; note = 2'-O-methyl ribonucleotide
  modified_base 55: mod_base = OTHER; note = 2'-O-methyl ribonucleotide
  modified_base 56: mod_base = OTHER; note = 2'-O-methyl ribonucleotide
  modified_base 57: mod_base = OTHER; note = 2'-O-methyl ribonucleotide
  modified_base 60: mod_base = OTHER; note = 2'-O-methyl ribonucleotide
  modified_base 61: mod_base = OTHER; note = 2'-O-methyl ribonucleotide
  modified_base 66: mod_base = OTHER; note = 2'-O-methyl ribonucleotide
  modified_base 67: mod_base = OTHER; note = 2'-O-methyl ribonucleotide
  modified_base 70: mod_base = OTHER; note = 2'-O-methyl ribonucleotide
  modified_base 71: mod_base = OTHER; note = 2'-O-methyl ribonucleotide
  modified_base 72: mod_base = OTHER; note = 2'-O-methyl ribonucleotide
  modified_base 74: mod_base = OTHER; note = 2'-O-methyl ribonucleotide
  modified_base 75: mod_base = OTHER; note = 2'-O-methyl ribonucleotide
  modified_base 76: mod_base = OTHER; note = 2'-O-methyl ribonucleotide
  modified_base 77: mod_base = OTHER; note = 2'-O-methyl ribonucleotide
  modified_base 78: mod_base = OTHER; note = 2'-O-methyl ribonucleotide
  modified_base 79: mod_base = OTHER; note = 2'-O-methyl ribonucleotide
  modified_base 80: mod_base = OTHER; note = 2'-O-methyl ribonucleotide
  modified_base 81: mod_base = OTHER; note = 2'-O-methyl ribonucleotide
  modified_base 83: mod_base = OTHER; note = 2'-O-methyl ribonucleotide
  modified_base 84: mod_base = OTHER; note = 2'-O-methyl ribonucleotide
  modified_base 85: mod_base = OTHER; note = 2'-O-methyl ribonucleotide
  modified_base 86: mod_base = OTHER; note = 2'-O-methyl ribonucleotide
  modified_base 87: mod_base = OTHER; note = 2'-O-methyl ribonucleotide
  modified_base 88: mod_base = OTHER; note = 2'-O-methyl ribonucleotide
  modified_base 89: mod_base = OTHER; note = 2'-O-methyl ribonucleotide
  modified_base 90: mod_base = OTHER; note = 2'-O-methyl ribonucleotide
  modified_base 91: mod_base = OTHER; note = 2'-O-methyl ribonucleotide
  modified_base 92: mod_base = OTHER; note = 2'-O-methyl ribonucleotide
  modified_base 93: mod_base = OTHER; note = 2'-O-methyl ribonucleotide
  modified_base 94: mod_base = OTHER; note = 2'-O-methyl ribonucleotide
  modified_base 95: mod_base = OTHER; note = 2'-O-methyl ribonucleotide
  modified_base 96: mod_base = OTHER; note = 2'-O-methyl ribonucleotide
  modified_base 97: mod_base = OTHER; note = 2'-O-methyl ribonucleotide
  modified_base 98: mod_base = OTHER; note = 2'-O-methyl ribonucleotide
  modified_base 99: mod_base = OTHER; note = 2'-O-methyl ribonucleotide
  modified_base 100: mod_base = OTHER; note = 2'-O-methyl ribonucleotide
  modified_base 101: mod_base = OTHER; note = uniform ribonucleotides (A, C, G, inosine or U), deoxynucleotides (A, G, C, inosine or T), ribonebularine, 2'-O-methylnebularine or deoxynebularine
  modified_base 102: mod_base = OTHER; note = uniform ribonucleotides (A, C, G, inosine or U), deoxynucleotides (A, G, C, inosine or T), ribonebularine, 2'-O-methylnebularine or deoxynebularine
  modified_base 103: mod_base = OTHER; note = uniform ribonucleotides (A, C, G, inosine or U), deoxynucleotides (A, G, C, inosine or T), ribonebularine, 2'-O-methylnebularine or deoxynebularine
  modified_base 1..3: mod_base = OTHER; note = phosphorothioate linkage
  modified_base 45..46: mod_base = OTHER; note = phosphorothioate linkage
  modified_base 64..65: mod_base = OTHER; note = phosphorothioate linkage
  modified_base 98..100: mod_base = OTHER; note = phosphorothioate linkage
  misc_feature 1..100: note = RNA
  misc_feature 101..103: note = Optionally DNA or RNA

SEQ ID NO: 3109 - DNA, 103 bp, synthetic construct; identical to SEQ ID NO: 1797
  source 1..103: mol_type = other DNA
  modified_base 1: mod_base = OTHER; note = 2'-O-methyl ribonucleotide
  modified_base 2: mod_base = OTHER; note = 2'-O-methyl ribonucleotide
  modified_base 3: mod_base = OTHER; note = 2'-O-methyl ribonucleotide
  modified_base 21: mod_base = OTHER; note = 2'-O-methyl ribonucleotide
  modified_base 28: mod_base = OTHER; note = 2'-O-methyl ribonucleotide
  modified_base 29: mod_base = OTHER; note = 2'-O-methyl ribonucleotide
  modified_base 30: mod_base = OTHER; note = 2'-O-methyl ribonucleotide
  modified_base 31: mod_base = OTHER; note = 2'-O-methyl ribonucleotide
  modified_base 32: mod_base = OTHER; note = 2'-O-methyl ribonucleotide
  modified_base 33: mod_base = OTHER; note = 2'-O-methyl ribonucleotide
  modified_base 34: mod_base = OTHER; note = 2'-O-methyl ribonucleotide
  modified_base 35: mod_base = OTHER; note = 2'-O-methyl ribonucleotide
  modified_base 36: mod_base = OTHER; note = 2'-O-methyl ribonucleotide
  modified_base 37: mod_base = OTHER; note = 2'-O-methyl ribonucleotide
  modified_base 38: mod_base = OTHER; note = 2'-O-methyl ribonucleotide
  modified_base 39: mod_base = OTHER; note = 2'-O-methyl ribonucleotide
  modified_base 40: mod_base = OTHER; note = 2'-O-methyl ribonucleotide
  modified_base 41: mod_base = OTHER; note = 2'-O-methyl ribonucleotide
  modified_base 42: mod_base = OTHER; note = 2'-O-methyl ribonucleotide
  modified_base 46: mod_base = OTHER; note = 2'-O-methyl ribonucleotide
  modified_base 48: mod_base = OTHER; note = 2'-O-methyl ribonucleotide
  modified_base 50: mod_base = OTHER; note = 2'-O-methyl ribonucleotide
  modified_base 52: mod_base = OTHER; note = 2'-O-methyl ribonucleotide
  modified_base 53: mod_base = OTHER; note = 2'-O-methyl ribonucleotide
  modified_base 54: mod_base = OTHER; note = 2'-O-methyl ribonucleotide
  modified_base 57: mod_base = OTHER; note = 2'-O-methyl ribonucleotide
  modified_base 61: mod_base = OTHER; note = 2'-O-methyl ribonucleotide
  modified_base 66: mod_base = OTHER; note = 2'-O-methyl ribonucleotide
  modified_base 67: mod_base = OTHER; note = 2'-O-methyl ribonucleotide
  modified_base 70: mod_base = OTHER; note = 2'-O-methyl ribonucleotide
  modified_base 71: mod_base = OTHER; note = 2'-O-methyl ribonucleotide
  modified_base 72: mod_base = OTHER; note = 2'-O-methyl ribonucleotide
  modified_base 74: mod_base = OTHER; note = 2'-O-methyl ribonucleotide
  modified_base 75: mod_base = OTHER; note = 2'-O-methyl ribonucleotide
  modified_base 76: mod_base = OTHER; note = 2'-O-methyl ribonucleotide
  modified_base 77: mod_base = OTHER; note = 2'-O-methyl ribonucleotide
  modified_base 78: mod_base = OTHER; note = 2'-O-methyl ribonucleotide
  modified_base 79: mod_base = OTHER; note = 2'-O-methyl ribonucleotide
  modified_base 80: mod_base = OTHER; note = 2'-O-methyl ribonucleotide
  modified_base 82: mod_base = OTHER; note = 2'-O-methyl ribonucleotide
  modified_base 83: mod_base = OTHER; note = 2'-O-methyl ribonucleotide
  modified_base 84: mod_base = OTHER; note = 2'-O-methyl ribonucleotide
  modified_base 85: mod_base = OTHER; note = 2'-O-methyl ribonucleotide
  modified_base 86: mod_base = OTHER; note = 2'-O-methyl ribonucleotide
  modified_base 87: mod_base = OTHER; note = 2'-O-methyl ribonucleotide
  modified_base 89: mod_base = OTHER; note = 2'-O-methyl ribonucleotide
  modified_base 92: mod_base = OTHER; note = 2'-O-methyl ribonucleotide
  modified_base 93: mod_base = OTHER; note = 2'-O-methyl ribonucleotide
  modified_base 94: mod_base = OTHER; note = 2'-O-methyl ribonucleotide
  modified_base 95: mod_base = OTHER; note = 2'-O-methyl ribonucleotide
  modified_base 96: mod_base = OTHER; note = 2'-O-methyl ribonucleotide
  modified_base 97: mod_base = OTHER; note = 2'-O-methyl ribonucleotide
  modified_base 98: mod_base = OTHER; note = 2'-O-methyl ribonucleotide
  modified_base 99: mod_base = OTHER; note = 2'-O-methyl ribonucleotide
  modified_base 100: mod_base = OTHER; note = 2'-O-methyl ribonucleotide
  modified_base 101: mod_base = OTHER; note = uniform ribonucleotides (A, C, G, inosine or U), deoxynucleotides (A, G, C, inosine or T), ribonebularine, 2'-O-methylnebularine or deoxynebularine
  modified_base 102: mod_base = OTHER; note = uniform ribonucleotides (A, C, G, inosine or U), deoxynucleotides (A, G, C, inosine or T), ribonebularine, 2'-O-methylnebularine or deoxynebularine
  modified_base 103: mod_base = OTHER; note = uniform ribonucleotides (A, C, G, inosine or U), deoxynucleotides (A, G, C, inosine or T), ribonebularine, 2'-O-methylnebularine or deoxynebularine
  modified_base 1..3: mod_base = OTHER; note = phosphorothioate linkage
  modified_base 45..46: mod_base = OTHER; note = phosphorothioate linkage
  modified_base 64..65: mod_base = OTHER; note = phosphorothioate linkage
  modified_base 98..100: mod_base = OTHER; note = phosphorothioate linkage
  misc_feature 1..100: note = RNA
  misc_feature 101..103: note = Optionally DNA or RNA

SEQ ID NO: 3110 - DNA, 103 bp, synthetic construct; identical to SEQ ID NO: 1797
  source 1..103: mol_type = other DNA
  modified_base 1: mod_base = OTHER; note = 2'-O-methyl ribonucleotide
  modified_base 2: mod_base = OTHER; note = 2'-O-methyl ribonucleotide
  modified_base 3: mod_base = OTHER; note = 2'-O-methyl ribonucleotide
  modified_base 21: mod_base = OTHER; note = 2'-O-methyl ribonucleotide
  modified_base 28: mod_base = OTHER; note = 2'-O-methyl ribonucleotide
  modified_base 29: mod_base = OTHER; note = 2'-O-methyl ribonucleotide
  modified_base 30: mod_base = OTHER; note = 2'-O-methyl ribonucleotide
  modified_base 31: mod_base = OTHER; note = 2'-O-methyl ribonucleotide
  modified_base 32: mod_base = OTHER; note = 2'-O-methyl ribonucleotide
  modified_base 33: mod_base = OTHER; note = 2'-O-methyl ribonucleotide
  modified_base 34: mod_base = OTHER; note = 2'-O-methyl ribonucleotide
  modified_base 35: mod_base = OTHER; note = 2'-O-methyl ribonucleotide
  modified_base 36: mod_base = OTHER; note = 2'-O-methyl ribonucleotide
  modified_base 37: mod_base = OTHER; note = 2'-O-methyl ribonucleotide
  modified_base 38: mod_base = OTHER; note = 2'-O-methyl ribonucleotide
  modified_base 39: mod_base = OTHER; note = 2'-O-methyl ribonucleotide
  modified_base 40: mod_base = OTHER; note = 2'-O-methyl ribonucleotide
  modified_base 41: mod_base = OTHER; note = 2'-O-methyl ribonucleotide
  modified_base 42: mod_base = OTHER; note = 2'-O-methyl ribonucleotide
  modified_base 46: mod_base = OTHER; note = 2'-O-methyl ribonucleotide
  modified_base 48: mod_base = OTHER; note = 2'-O-methyl ribonucleotide
  modified_base 50: mod_base = OTHER; note = 2'-O-methyl ribonucleotide
  modified_base 52: mod_base = OTHER; note = 2'-O-methyl ribonucleotide
  modified_base 53: mod_base = OTHER; note = 2'-O-methyl ribonucleotide
  modified_base 54: mod_base = OTHER; note = 2'-O-methyl ribonucleotide
  modified_base 55: mod_base = OTHER; note = 2'-O-methyl ribonucleotide
  modified_base 56: mod_base = OTHER; note = 2'-O-methyl ribonucleotide
  modified_base 57: mod_base = OTHER; note = 2'-O-methyl ribonucleotide
  modified_base 60: mod_base = OTHER; note = 2'-O-methyl ribonucleotide
  modified_base 61: mod_base = OTHER; note = 2'-O-methyl ribonucleotide
  modified_base 66: mod_base = OTHER; note = 2'-O-methyl ribonucleotide
  modified_base 67: mod_base = OTHER; note = 2'-O-methyl ribonucleotide
  modified_base 70: mod_base = OTHER; note = 2'-O-methyl ribonucleotide
  modified_base 71: mod_base = OTHER; note = 2'-O-methyl ribonucleotide
  modified_base 72: mod_base = OTHER; note = 2'-O-methyl ribonucleotide
  modified_base 74: mod_base = OTHER; note = 2'-O-methyl ribonucleotide
  modified_base 75: mod_base = OTHER; note = 2'-O-methyl ribonucleotide
  modified_base 76: mod_base = OTHER; note = 2'-O-methyl ribonucleotide
  modified_base 77: mod_base = OTHER; note = 2'-O-methyl ribonucleotide
  modified_base 78: mod_base = OTHER; note = 2'-O-methyl ribonucleotide
  modified_base 79: mod_base = OTHER; note = 2'-O-methyl ribonucleotide
  modified_base 80: mod_base = OTHER; note = 2'-O-methyl ribonucleotide
  modified_base 82: mod_base = OTHER; note = 2'-O-methyl ribonucleotide
  modified_base 83: mod_base = OTHER; note = 2'-O-methyl ribonucleotide
  modified_base 84: mod_base = OTHER; note = 2'-O-methyl ribonucleotide
  modified_base 85: mod_base = OTHER; note = 2'-O-methyl ribonucleotide
  modified_base 86: mod_base = OTHER; note = 2'-O-methyl ribonucleotide
  modified_base 87: mod_base = OTHER; note = 2'-O-methyl ribonucleotide
  modified_base 89: mod_base = OTHER; note = 2'-O-methyl ribonucleotide
  modified_base 92: mod_base = OTHER; note = 2'-O-methyl ribonucleotide
  modified_base 93: mod_base = OTHER; note = 2'-O-methyl ribonucleotide
  modified_base 94: mod_base = OTHER; note = 2'-O-methyl ribonucleotide
  modified_base 95: mod_base = OTHER; note = 2'-O-methyl ribonucleotide
  modified_base 96: mod_base = OTHER; note = 2'-O-methyl ribonucleotide
  modified_base 97: mod_base = OTHER; note = 2'-O-methyl ribonucleotide
  modified_base 98: mod_base = OTHER; note = 2'-O-methyl ribonucleotide
  modified_base 99: mod_base = OTHER; note = 2'-O-methyl ribonucleotide
  modified_base 100: mod_base = OTHER; note = 2'-O-methyl ribonucleotide
  modified_base 101: mod_base = OTHER; note = uniform ribonucleotides (A, C, G, inosine or U), deoxynucleotides (A, G, C, inosine or T), ribonebularine, 2'-O-methylnebularine or deoxynebularine
  modified_base 102: mod_base = OTHER; note = uniform ribonucleotides (A, C, G, inosine or U), deoxynucleotides (A, G, C, inosine or T), ribonebularine, 2'-O-methylnebularine or deoxynebularine
  modified_base 103: mod_base = OTHER; note = uniform ribonucleotides (A, C, G, inosine or U), deoxynucleotides (A, G, C, inosine or T), ribonebularine, 2'-O-methylnebularine or deoxynebularine
  modified_base 1..3: mod_base = OTHER; note = phosphorothioate linkage
  modified_base 45..46: mod_base = OTHER; note = phosphorothioate linkage
  modified_base 64..65: mod_base = OTHER; note = phosphorothioate linkage
  modified_base 98..100: mod_base = OTHER; note = phosphorothioate linkage
  misc_feature 1..100: note = RNA
  misc_feature 101..103: note = Optionally DNA or RNA

SEQ ID NO: 3111 - DNA, 103 bp, synthetic construct; identical to SEQ ID NO: 1797
  source 1..103: mol_type = other DNA
  modified_base 1: mod_base = OTHER; note = 2'-O-methyl ribonucleotide
  modified_base 2: mod_base = OTHER; note = 2'-O-methyl ribonucleotide
  modified_base 3: mod_base = OTHER; note = 2'-O-methyl ribonucleotide
  modified_base 21: mod_base = OTHER; note = 2'-O-methyl ribonucleotide
  modified_base 28: mod_base = OTHER; note = 2'-O-methyl ribonucleotide
  modified_base 29: mod_base = OTHER; note = 2'-O-methyl ribonucleotide
  modified_base 30: mod_base = OTHER; note = 2'-O-methyl ribonucleotide
  modified_base 31: mod_base = OTHER; note = 2'-O-methyl ribonucleotide
  modified_base 32: mod_base = OTHER; note = 2'-O-methyl ribonucleotide
  modified_base 33: mod_base = OTHER; note = 2'-O-methyl ribonucleotide
  modified_base 34: mod_base = OTHER; note = 2'-O-methyl ribonucleotide
  modified_base 35: mod_base = OTHER; note = 2'-O-methyl ribonucleotide
  modified_base 36: mod_base = OTHER; note = 2'-O-methyl ribonucleotide
  modified_base 37: mod_base = OTHER; note = 2'-O-methyl ribonucleotide
  modified_base 38: mod_base = OTHER; note = 2'-O-methyl ribonucleotide
  modified_base 39: mod_base = OTHER; note = 2'-O-methyl ribonucleotide
  modified_base 40: mod_base = OTHER; note = 2'-O-methyl ribonucleotide
  modified_base 41: mod_base = OTHER; note = 2'-O-methyl ribonucleotide
  modified_base 42: mod_base = OTHER; note = 2'-O-methyl ribonucleotide
  modified_base 46: mod_base = OTHER; note = 2'-O-methyl ribonucleotide
  modified_base 48: mod_base = OTHER; note = 2'-O-methyl ribonucleotide
  modified_base 50: mod_base = OTHER; note = 2'-O-methyl ribonucleotide
  modified_base 52: mod_base = OTHER; note = 2'-O-methyl ribonucleotide
  modified_base 53: mod_base = OTHER; note = 2'-O-methyl ribonucleotide
  modified_base 54: mod_base = OTHER; note = 2'-O-methyl ribonucleotide
  modified_base 57: mod_base = OTHER; note = 2'-O-methyl ribonucleotide
  modified_base 61: mod_base = OTHER; note = 2'-O-methyl ribonucleotide
  modified_base 66: mod_base = OTHER; note = 2'-O-methyl ribonucleotide
  modified_base 67: mod_base = OTHER; note = 2'-O-methyl ribonucleotide
  modified_base 70: mod_base = OTHER; note = 2'-O-methyl ribonucleotide
  modified_base 71: mod_base = OTHER; note = 2'-O-methyl ribonucleotide
  modified_base 72: mod_base = OTHER; note = 2'-O-methyl ribonucleotide
  modified_base 73: mod_base = OTHER; note = 2'-O-methyl ribonucleotide
  modified_base 74: mod_base = OTHER; note = 2'-O-methyl ribonucleotide
  modified_base 75: mod_base = OTHER; note = 2'-O-methyl ribonucleotide
  modified_base 76: mod_base = OTHER; note = 2'-O-methyl ribonucleotide
  modified_base 77: mod_base = OTHER; note = 2'-O-methyl ribonucleotide
  modified_base 78: mod_base = OTHER; note = 2'-O-methyl ribonucleotide
  modified_base 79: mod_base = OTHER; note = 2'-O-methyl ribonucleotide
  modified_base 80: mod_base = OTHER; note = 2'-O-methyl ribonucleotide
  modified_base 82: mod_base = OTHER; note = 2'-O-methyl ribonucleotide
  modified_base 83: mod_base = OTHER; note = 2'-O-methyl ribonucleotide
  modified_base 84: mod_base = OTHER; note = 2'-O-methyl ribonucleotide
  modified_base 85: mod_base = OTHER; note = 2'-O-methyl ribonucleotide
  modified_base 86: mod_base = OTHER; note = 2'-O-methyl ribonucleotide
  modified_base 87: mod_base = OTHER; note = 2'-O-methyl ribonucleotide
  modified_base 89: mod_base = OTHER; note = 2'-O-methyl ribonucleotide
  modified_base 92: mod_base = OTHER; note = 2'-O-methyl ribonucleotide
  modified_base 93: mod_base = OTHER; note = 2'-O-methyl ribonucleotide
  modified_base 94: mod_base = OTHER; note = 2'-O-methyl ribonucleotide
  modified_base 95: mod_base = OTHER; note = 2'-O-methyl ribonucleotide
  modified_base 96: mod_base = OTHER; note = 2'-O-methyl ribonucleotide
  modified_base 97: mod_base = OTHER; note = 2'-O-methyl ribonucleotide
  modified_base 98: mod_base = OTHER; note = 2'-O-methyl ribonucleotide
  modified_base 99: mod_base = OTHER; note = 2'-O-methyl ribonucleotide
  modified_base 100: mod_base = OTHER; note = 2'-O-methyl ribonucleotide
  modified_base 101: mod_base = OTHER; note = uniform ribonucleotides (A, C, G, inosine or U), deoxynucleotides (A, G, C, inosine or T), ribonebularine, 2'-O-methylnebularine or deoxynebularine
  modified_base 102: mod_base = OTHER; note = uniform ribonucleotides (A, C, G, inosine or U), deoxynucleotides (A, G, C, inosine or T), ribonebularine, 2'-O-methylnebularine or deoxynebularine
  modified_base 103: mod_base = OTHER; note = uniform ribonucleotides (A, C, G, inosine or U), deoxynucleotides (A, G, C, inosine or T), ribonebularine, 2'-O-methylnebularine or deoxynebularine
  modified_base 1..3: mod_base = OTHER; note = phosphorothioate linkage
  modified_base 45..46: mod_base = OTHER; note = phosphorothioate linkage
  modified_base 64..65: mod_base = OTHER; note = phosphorothioate linkage
  modified_base 98..100: mod_base = OTHER; note = phosphorothioate linkage
  misc_feature 1..100: note = RNA
  misc_feature 101..103: note = Optionally DNA or RNA

SEQ ID NO: 3112 - DNA, 103 bp, synthetic construct; identical to SEQ ID NO: 1797
  source 1..103: mol_type = other DNA
  modified_base 1: mod_base = OTHER; note = 2'-O-methyl ribonucleotide
  modified_base 2: mod_base = OTHER; note = 2'-O-methyl ribonucleotide
  modified_base 3: mod_base = OTHER; note = 2'-O-methyl ribonucleotide
  modified_base 21: mod_base = OTHER; note = 2'-O-methyl ribonucleotide
  modified_base 28: mod_base = OTHER; note = 2'-O-methyl ribonucleotide
  modified_base 29: mod_base = OTHER; note = 2'-O-methyl ribonucleotide
  modified_base 30: mod_base = OTHER; note = 2'-O-methyl ribonucleotide
  modified_base 31: mod_base = OTHER; note = 2'-O-methyl ribonucleotide
  modified_base 32: mod_base = OTHER; note = 2'-O-methyl ribonucleotide
  modified_base 34: mod_base = OTHER; note = 2'-O-methyl ribonucleotide
  modified_base 35: mod_base = OTHER; note = 2'-O-methyl ribonucleotide
  modified_base 36: mod_base = OTHER; note = 2'-O-methyl ribonucleotide
  modified_base 37: mod_base = OTHER; note = 2'-O-methyl ribonucleotide
  modified_base 38: mod_base = OTHER; note = 2'-O-methyl ribonucleotide
  modified_base 39: mod_base = OTHER; note = 2'-O-methyl ribonucleotide
  modified_base 40: mod_base = OTHER; note = 2'-O-methyl ribonucleotide
  modified_base 41: mod_base = OTHER; note = 2'-O-methyl ribonucleotide
  modified_base 42: mod_base = OTHER; note = 2'-O-methyl ribonucleotide
  modified_base 46: mod_base = OTHER; note = 2'-O-methyl ribonucleotide
  modified_base 48: mod_base = OTHER; note = 2'-O-methyl ribonucleotide
  modified_base 50: mod_base = OTHER; note = 2'-O-methyl ribonucleotide
  modified_base 52: mod_base = OTHER; note = 2'-O-methyl ribonucleotide
  modified_base 53: mod_base = OTHER; note = 2'-O-methyl ribonucleotide
  modified_base 54: mod_base = OTHER; note = 2'-O-methyl ribonucleotide
  modified_base 57: mod_base = OTHER; note = 2'-O-methyl ribonucleotide
  modified_base 61: mod_base = OTHER; note = 2'-O-methyl ribonucleotide
  modified_base 66: mod_base = OTHER; note = 2'-O-methyl ribonucleotide
  modified_base 67: mod_base = OTHER; note = 2'-O-methyl ribonucleotide
  modified_base 70: mod_base = OTHER; note = 2'-O-methyl ribonucleotide
  modified_base 71: mod_base = OTHER; note = 2'-O-methyl ribonucleotide
  modified_base 72: mod_base = OTHER; note = 2'-O-methyl ribonucleotide
  modified_base 73: mod_base = OTHER; note = 2'-O-methyl ribonucleotide
  modified_base 74: mod_base = OTHER; note = 2'-O-methyl ribonucleotide
  modified_base 75: mod_base = OTHER; note = 2'-O-methyl ribonucleotide
  modified_base 76: mod_base = OTHER; note = 2'-O-methyl ribonucleotide
  modified_base 77: mod_base = OTHER; note = 2'-O-methyl ribonucleotide
  modified_base 78: mod_base = OTHER; note = 2'-O-methyl ribonucleotide
  modified_base 79: mod_base = OTHER; note = 2'-O-methyl ribonucleotide
  modified_base 80: mod_base = OTHER; note = 2'-O-methyl ribonucleotide
  modified_base 82: mod_base = OTHER; note = 2'-O-methyl ribonucleotide
  modified_base 83: mod_base = OTHER; note = 2'-O-methyl ribonucleotide
  modified_base 84: mod_base = OTHER; note = 2'-O-methyl ribonucleotide
  modified_base 85: mod_base = OTHER; note = 2'-O-methyl ribonucleotide
  modified_base 86: mod_base = OTHER; note = 2'-O-methyl ribonucleotide
  modified_base 87: mod_base = OTHER; note = 2'-O-methyl ribonucleotide
  modified_base 89: mod_base = OTHER; note = 2'-O-methyl ribonucleotide
  modified_base 92: mod_base = OTHER; note = 2'-O-methyl ribonucleotide
  modified_base 93: mod_base = OTHER; note = 2'-O-methyl ribonucleotide
  modified_base 94: mod_base = OTHER; note = 2'-O-methyl ribonucleotide
  modified_base 95: mod_base = OTHER; note = 2'-O-methyl ribonucleotide
  modified_base 96: mod_base = OTHER; note = 2'-O-methyl ribonucleotide
  modified_base 97: mod_base = OTHER; note = 2'-O-methyl ribonucleotide
  modified_base 98: mod_base = OTHER; note = 2'-O-methyl ribonucleotide
  modified_base 99: mod_base = OTHER; note = 2'-O-methyl ribonucleotide
  modified_base 100: mod_base = OTHER; note = 2'-O-methyl ribonucleotide
  modified_base 101: mod_base = OTHER; note = uniform ribonucleotides (A, C, G, inosine or U), deoxynucleotides (A, G, C, inosine or T), ribonebularine, 2'-O-methylnebularine or deoxynebularine
  modified_base 102: mod_base = OTHER; note = uniform ribonucleotides (A, C, G, inosine or U), deoxynucleotides (A, G, C, inosine or T), ribonebularine, 2'-O-methylnebularine or deoxynebularine
  modified_base 103: mod_base = OTHER; note = uniform ribonucleotides (A, C, G, inosine or U), deoxynucleotides (A, G, C, inosine or T), ribonebularine, 2'-O-methylnebularine or deoxynebularine
  modified_base 1..3: mod_base = OTHER; note = phosphorothioate linkage
  modified_base 45..46: mod_base = OTHER; note = phosphorothioate linkage
  modified_base 64..65: mod_base = OTHER; note = phosphorothioate linkage
  modified_base 98..100: mod_base = OTHER; note = phosphorothioate linkage
  misc_feature 1..100: note = RNA
  misc_feature 101..103: note = Optionally DNA or RNA

SEQ ID NO: 3113 - DNA, 103 bp, synthetic construct; identical to SEQ ID NO: 1797
  source 1..103: mol_type = other DNA
  modified_base 1: mod_base = OTHER; note = 2'-O-methyl ribonucleotide
  modified_base 2: mod_base = OTHER; note = 2'-O-methyl ribonucleotide
  modified_base 3: mod_base = OTHER; note = 2'-O-methyl ribonucleotide
  modified_base 21: mod_base = OTHER; note = 2'-O-methyl ribonucleotide
  modified_base 28: mod_base = OTHER; note = 2'-O-methyl ribonucleotide
  modified_base 29: mod_base = OTHER; note = 2'-O-methyl ribonucleotide
  modified_base 30: mod_base = OTHER; note = 2'-O-methyl ribonucleotide
  modified_base 31: mod_base = OTHER; note = 2'-O-methyl ribonucleotide
  modified_base 32: mod_base = OTHER; note = 2'-O-methyl ribonucleotide
  modified_base 34: mod_base = OTHER; note = 2'-O-methyl ribonucleotide
  modified_base 35: mod_base = OTHER; note = 2'-O-methyl ribonucleotide
  modified_base 36: mod_base = OTHER; note = 2'-O-methyl ribonucleotide
  modified_base 37: mod_base = OTHER; note = 2'-O-methyl ribonucleotide
  modified_base 38: mod_base = OTHER; note = 2'-O-methyl ribonucleotide
  modified_base 39: mod_base = OTHER; note = 2'-O-methyl ribonucleotide
  modified_base 40: mod_base = OTHER; note = 2'-O-methyl ribonucleotide
  modified_base 41: mod_base = OTHER; note = 2'-O-methyl ribonucleotide
  modified_base 42: mod_base = OTHER; note = 2'-O-methyl ribonucleotide
  modified_base 46: mod_base = OTHER; note = 2'-O-methyl ribonucleotide
  modified_base 48: mod_base = OTHER; note = 2'-O-methyl ribonucleotide
  modified_base 50: mod_base = OTHER; note = 2'-O-methyl ribonucleotide
  modified_base 52: mod_base = OTHER; note = 2'-O-methyl ribonucleotide
  modified_base 53: mod_base = OTHER; note = 2'-O-methyl ribonucleotide
  modified_base 54: mod_base = OTHER; note = 2'-O-methyl ribonucleotide
  modified_base 57: mod_base = OTHER; note = 2'-O-methyl ribonucleotide
  modified_base 61: mod_base = OTHER; note = 2'-O-methyl ribonucleotide
  modified_base 66: mod_base = OTHER; note = 2'-O-methyl ribonucleotide
  modified_base 67: mod_base = OTHER; note = 2'-O-methyl ribonucleotide
  modified_base 70: mod_base = OTHER; note = 2'-O-methyl ribonucleotide
  modified_base 71: mod_base = OTHER; note = 2'-O-methyl ribonucleotide
  modified_base 72: mod_base = OTHER; note = 2'-O-methyl ribonucleotide
  modified_base 73: mod_base = OTHER; note = 2'-O-methyl ribonucleotide
  modified_base 74: mod_base = OTHER; note = 2'-O-methyl ribonucleotide
  modified_base 75: mod_base = OTHER; note = 2'-O-methyl ribonucleotide
  modified_base 76: mod_base = OTHER; note = 2'-O-methyl ribonucleotide
  modified_base 77: mod_base = OTHER; note = 2'-O-methyl ribonucleotide
  modified_base 78: mod_base = OTHER; note = 2'-O-methyl ribonucleotide
  modified_base 79: mod_base = OTHER; note = 2'-O-methyl ribonucleotide
  modified_base 80: mod_base = OTHER; note = 2'-O-methyl ribonucleotide
  modified_base 82: mod_base = OTHER; note = 2'-O-methyl ribonucleotide
  modified_base 83: mod_base = OTHER; note = 2'-O-methyl ribonucleotide
  modified_base 84: mod_base = OTHER; note = 2'-O-methyl ribonucleotide
  modified_base 85: mod_base = OTHER; note = 2'-O-methyl ribonucleotide
  modified_base 86: mod_base = OTHER; note = 2'-O-methyl ribonucleotide
  modified_base 87: mod_base = OTHER; note = 2'-O-methyl ribonucleotide
  modified_base 89: mod_base = OTHER; note = 2'-O-methyl ribonucleotide
  modified_base 91: mod_base = OTHER; note = 2'-O-methyl ribonucleotide
  modified_base 92: mod_base = OTHER; note = 2'-O-methyl ribonucleotide
  modified_base 93: mod_base = OTHER; note = 2'-O-methyl ribonucleotide
  modified_base 94: mod_base = OTHER; note = 2'-O-methyl ribonucleotide
  modified_base 95: mod_base = OTHER; note = 2'-O-methyl ribonucleotide
  modified_base 96: mod_base = OTHER; note = 2'-O-methyl ribonucleotide
  modified_base 97: mod_base = OTHER; note = 2'-O-methyl ribonucleotide
  modified_base 98: mod_base = OTHER; note = 2'-O-methyl ribonucleotide
  modified_base 99: mod_base = OTHER; note = 2'-O-methyl ribonucleotide
  modified_base 100: mod_base = OTHER; note = 2'-O-methyl ribonucleotide
  modified_base 101: mod_base = OTHER; note = uniform ribonucleotides (A, C, G, inosine or U), deoxynucleotides (A, G, C, inosine or T), ribonebularine, 2'-O-methylnebularine or deoxynebularine
  modified_base 102: mod_base = OTHER; note = uniform ribonucleotides (A, C, G, inosine or U), deoxynucleotides (A, G, C, inosine or T), ribonebularine, 2'-O-methylnebularine or deoxynebularine
  modified_base 103: mod_base = OTHER; note = uniform ribonucleotides (A, C, G, inosine or U), deoxynucleotides (A, G, C, inosine or T), ribonebularine, 2'-O-methylnebularine or deoxynebularine
  modified_base 1..3: mod_base = OTHER; note = phosphorothioate linkage
  modified_base 45..46: mod_base = OTHER; note = phosphorothioate linkage
  modified_base 64..65: mod_base = OTHER; note = phosphorothioate linkage
  modified_base 98..100: mod_base = OTHER; note = phosphorothioate linkage
  misc_feature 1..100: note = RNA
  misc_feature 101..103: note = Optionally DNA or RNA

SEQ ID NO: 3114 - DNA, 103 bp, synthetic construct; identical to SEQ ID NO: 1797
  source 1..103: mol_type = other DNA
  modified_base 1: mod_base = OTHER; note = 2'-O-methyl ribonucleotide
  modified_base 2: mod_base = OTHER; note = 2'-O-methyl ribonucleotide
  modified_base 3: mod_base = OTHER; note = 2'-O-methyl ribonucleotide
  modified_base 21: mod_base = OTHER; note = 2'-O-methyl ribonucleotide
  modified_base 28: mod_base = OTHER; note = 2'-O-methyl ribonucleotide
  modified_base 29: mod_base = OTHER; note = 2'-O-methyl ribonucleotide
  modified_base 30: mod_base = OTHER; note = 2'-O-methyl ribonucleotide
  modified_base 31: mod_base = OTHER; note = 2'-O-methyl ribonucleotide
  modified_base 32: mod_base = OTHER; note = 2'-O-methyl ribonucleotide
  modified_base 34: mod_base = OTHER; note = 2'-O-methyl ribonucleotide
  modified_base 35: mod_base = OTHER; note = 2'-O-methyl ribonucleotide
  modified_base 36: mod_base = OTHER; note = 2'-O-methyl ribonucleotide
  modified_base 37: mod_base = OTHER; note = 2'-O-methyl ribonucleotide
  modified_base 38: mod_base = OTHER; note = 2'-O-methyl ribonucleotide
  modified_base 39: mod_base = OTHER; note = 2'-O-methyl ribonucleotide
  modified_base 40: mod_base = OTHER; note = 2'-O-methyl ribonucleotide
  modified_base 41: mod_base = OTHER; note = 2'-O-methyl ribonucleotide
  modified_base 42: mod_base = OTHER; note = 2'-O-methyl ribonucleotide
  modified_base 46: mod_base = OTHER; note = 2'-O-methyl ribonucleotide
  modified_base 48: mod_base = OTHER; note = 2'-O-methyl ribonucleotide
  modified_base 50: mod_base = OTHER; note = 2'-O-methyl ribonucleotide
  modified_base 52: mod_base = OTHER; note = 2'-O-methyl ribonucleotide
  modified_base 53: mod_base = OTHER; note = 2'-O-methyl ribonucleotide
  modified_base 54: mod_base = OTHER; note = 2'-O-methyl ribonucleotide
  modified_base 55: mod_base = OTHER; note = 2'-O-methyl ribonucleotide
  modified_base 56: mod_base = OTHER; note = 2'-O-methyl ribonucleotide
  modified_base 57: mod_base = OTHER; note = 2'-O-methyl ribonucleotide
  modified_base 60: mod_base = OTHER; note = 2'-O-methyl ribonucleotide
  modified_base 61: mod_base = OTHER; note = 2'-O-methyl ribonucleotide
  modified_base 66: mod_base = OTHER; note = 2'-O-methyl ribonucleotide
  modified_base 67: mod_base = OTHER; note = 2'-O-methyl ribonucleotide
  modified_base 70: mod_base = OTHER; note = 2'-O-methyl ribonucleotide
  modified_base 71: mod_base = OTHER; note = 2'-O-methyl ribonucleotide
  modified_base 72: mod_base = OTHER; note = 2'-O-methyl ribonucleotide
  modified_base 74: mod_base = OTHER; note = 2'-O-methyl ribonucleotide
  modified_base 75: mod_base = OTHER; note = 2'-O-methyl ribonucleotide
  modified_base 76: mod_base = OTHER; note = 2'-O-methyl ribonucleotide
  modified_base 77: mod_base = OTHER; note = 2'-O-methyl ribonucleotide
  modified_base 78: mod_base = OTHER; note = 2'-O-methyl ribonucleotide
  modified_base 79: mod_base = OTHER; note = 2'-O-methyl ribonucleotide
  modified_base 80: mod_base = OTHER; note = 2'-O-methyl ribonucleotide
  modified_base 82: mod_base = OTHER; note = 2'-O-methyl ribonucleotide
  modified_base 83: mod_base = OTHER; note = 2'-O-methyl ribonucleotide
  modified_base 84: mod_base = OTHER; note = 2'-O-methyl ribonucleotide
  modified_base 85: mod_base = OTHER; note = 2'-O-methyl ribonucleotide
  modified_base 86: mod_base = OTHER; note = 2'-O-methyl ribonucleotide
  modified_base 87: mod_base = OTHER; note = 2'-O-methyl ribonucleotide
  modified_base 89: mod_base = OTHER; note = 2'-O-methyl ribonucleotide
  modified_base 92: mod_base = OTHER; note = 2'-O-methyl ribonucleotide
  modified_base 93: mod_base = OTHER; note = 2'-O-methyl ribonucleotide
  modified_base 94: mod_base = OTHER; note = 2'-O-methyl ribonucleotide
  modified_base 95: mod_base = OTHER; note = 2'-O-methyl ribonucleotide
  modified_base 96: mod_base = OTHER; note = 2'-O-methyl ribonucleotide
  modified_base 97: mod_base = OTHER; note = 2'-O-methyl ribonucleotide
  modified_base 98: mod_base = OTHER; note = 2'-O-methyl ribonucleotide
  modified_base 99: mod_base = OTHER; note = 2'-O-methyl ribonucleotide
  modified_base 100: mod_base = OTHER; note = 2'-O-methyl ribonucleotide
  modified_base 101: mod_base = OTHER; note = uniform ribonucleotides (A, C, G, inosine or U), deoxynucleotides (A, G, C, inosine or T), ribonebularine, 2'-O-methylnebularine or deoxynebularine
  modified_base 102: mod_base = OTHER; note = uniform ribonucleotides (A, C, G, inosine or U), deoxynucleotides (A, G, C, inosine or T), ribonebularine, 2'-O-methylnebularine or deoxynebularine
  modified_base 103: mod_base = OTHER; note = uniform ribonucleotides (A, C, G, inosine or U), deoxynucleotides (A, G, C, inosine or T), ribonebularine, 2'-O-methylnebularine or deoxynebularine
  modified_base 1..3: mod_base = OTHER; note = phosphorothioate linkage
  modified_base 45..46: mod_base = OTHER; note = phosphorothioate linkage
  modified_base 64..65: mod_base = OTHER; note = phosphorothioate linkage
  modified_base 98..100: mod_base = OTHER; note = phosphorothioate linkage
  misc_feature 1..100: note = RNA
  misc_feature 101..103: note = Optionally DNA or RNA

SEQ ID NO: 3115 - DNA, 103 bp, synthetic construct; identical to SEQ ID NO: 1795
  source 1..103: mol_type = other DNA
  modified_base 1: mod_base = OTHER; note = 2'-O-methyl ribonucleotide
  modified_base 2: mod_base = OTHER; note = 2'-O-methyl ribonucleotide
  modified_base 3: mod_base = OTHER; note = 2'-O-methyl ribonucleotide
  modified_base 21: mod_base = OTHER; note = 2'-O-methyl ribonucleotide
  modified_base 28: mod_base = OTHER; note = 2'-O-methyl ribonucleotide
  modified_base 29: mod_base = OTHER; note = 2'-O-methyl ribonucleotide
  modified_base 30: mod_base = OTHER; note = 2'-O-methyl ribonucleotide
  modified_base 31: mod_base = OTHER; note = 2'-O-methyl ribonucleotide
  modified_base 32: mod_base = OTHER; note = 2'-O-methyl ribonucleotide
  modified_base 33: mod_base = OTHER; note = 2'-O-methyl ribonucleotide
  modified_base 34: mod_base = OTHER; note = 2'-O-methyl ribonucleotide
  modified_base 35: mod_base = OTHER; note = 2'-O-methyl ribonucleotide
  modified_base 36: mod_base = OTHER; note = 2'-O-methyl ribonucleotide
  modified_base 37: mod_base = OTHER; note = 2'-O-methyl ribonucleotide
  modified_base 38: mod_base = OTHER; note = 2'-O-methyl ribonucleotide
  modified_base 39: mod_base = OTHER; note = 2'-O-methyl ribonucleotide
  modified_base 40: mod_base = OTHER; note = 2'-O-methyl ribonucleotide
  modified_base 41: mod_base = OTHER; note = 2'-O-methyl ribonucleotide
  modified_base 42: mod_base = OTHER; note = 2'-O-methyl ribonucleotide
  modified_base 46: mod_base = OTHER; note = 2'-O-methyl ribonucleotide
  modified_base 48: mod_base = OTHER; note = 2'-O-methyl ribonucleotide
  modified_base 50: mod_base = OTHER; note = 2'-O-methyl ribonucleotide
  modified_base 52: mod_base = OTHER; note = 2'-O-methyl ribonucleotide
  modified_base 53: mod_base = OTHER; note = 2'-O-methyl ribonucleotide
  modified_base 54: mod_base = OTHER; note = 2'-O-methyl ribonucleotide
  modified_base 55: mod_base = OTHER; note = 2'-O-methyl ribonucleotide
  modified_base 56: mod_base = OTHER; note = 2'-O-methyl ribonucleotide
  modified_base 57: mod_base = OTHER; note = 2'-O-methyl ribonucleotide
  modified_base 60: mod_base = OTHER; note = 2'-O-methyl ribonucleotide
  modified_base 61: mod_base = OTHER; note = 2'-O-methyl ribonucleotide
  modified_base 66: mod_base = OTHER; note = 2'-O-methyl ribonucleotide
  modified_base 67: mod_base = OTHER; note = 2'-O-methyl ribonucleotide
  modified_base 70: mod_base = OTHER; note = 2'-O-methyl ribonucleotide
  modified_base 71: mod_base = OTHER; note = 2'-O-methyl ribonucleotide
  modified_base 72: mod_base = OTHER; note = 2'-O-methyl ribonucleotide
  modified_base 73: mod_base = OTHER; note = 2'-O-methyl ribonucleotide
  modified_base 74: mod_base = OTHER; note = 2'-O-methyl ribonucleotide
  modified_base 75: mod_base = OTHER; note = 2'-O-methyl ribonucleotide
  modified_base 76: mod_base = OTHER; note = 2'-O-methyl ribonucleotide
  modified_base 77: mod_base = OTHER; note = 2'-O-methyl ribonucleotide
  modified_base 78: mod_base = OTHER; note = 2'-O-methyl ribonucleotide
  modified_base 79: mod_base = OTHER; note = 2'-O-methyl ribonucleotide
  modified_base 80: mod_base = OTHER; note = 2'-O-methyl ribonucleotide
  modified_base 81: mod_base = OTHER; note = 2'-O-methyl ribonucleotide
  modified_base 83: mod_base = OTHER; note = 2'-O-methyl ribonucleotide
  modified_base 84: mod_base = OTHER; note = 2'-O-methyl ribonucleotide
  modified_base 85: mod_base = OTHER; note = 2'-O-methyl ribonucleotide
  modified_base 86: mod_base = OTHER; note = 2'-O-methyl ribonucleotide
  modified_base 87: mod_base = OTHER; note = 2'-O-methyl ribonucleotide
  modified_base 88: mod_base = OTHER; note = 2'-O-methyl ribonucleotide
  modified_base 89: mod_base = OTHER; note = 2'-O-methyl ribonucleotide
  modified_base 90: mod_base = OTHER; note = 2'-O-methyl ribonucleotide
  modified_base 91: mod_base = OTHER; note = 2'-O-methyl ribonucleotide
  modified_base 92: mod_base = OTHER; note = 2'-O-methyl ribonucleotide
  modified_base 93: mod_base = OTHER; note = 2'-O-methyl ribonucleotide
  modified_base 94: mod_base = OTHER; note = 2'-O-methyl ribonucleotide
  modified_base 95: mod_base = OTHER; note = 2'-O-methyl ribonucleotide
  modified_base 96: mod_base = OTHER; note = 2'-O-methyl ribonucleotide
  modified_base 97: mod_base = OTHER; note = 2'-O-methyl ribonucleotide
  modified_base 98: mod_base = OTHER; note = 2'-O-methyl ribonucleotide
  modified_base 99: mod_base = OTHER; note = 2'-O-methyl ribonucleotide
  modified_base 100: mod_base = OTHER; note = 2'-O-methyl ribonucleotide
  modified_base 101: mod_base = OTHER; note = uniform ribonucleotides (A, C, G, inosine or U), deoxynucleotides (A, G, C, inosine or T), ribonebularine, 2'-O-methylnebularine or deoxynebularine
  modified_base 102: mod_base = OTHER; note = uniform ribonucleotides (A, C, G, inosine or U), deoxynucleotides (A, G, C, inosine or T), ribonebularine, 2'-O-methylnebularine or deoxynebularine
  modified_base 103: mod_base = OTHER; note = uniform ribonucleotides (A, C, G, inosine or U), deoxynucleotides (A, G, C, inosine or T), ribonebularine, 2'-O-methylnebularine or deoxynebularine
  modified_base 1..3: mod_base = OTHER; note = phosphorothioate linkage
  modified_base 25..26: mod_base = OTHER; note = phosphorothioate linkage
  modified_base 45..46: mod_base = OTHER; note = phosphorothioate linkage
  modified_base 98..100: mod_base = OTHER; note = phosphorothioate linkage
  misc_feature 1..100: note = RNA
  misc_feature 101..103: note = Optionally DNA or RNA

SEQ ID NO: 3116 - DNA, 103 bp, synthetic construct; identical to SEQ ID NO: 1795
  source 1..103: mol_type = other DNA
  modified_base 1: mod_base = OTHER; note = 2'-O-methyl ribonucleotide
  modified_base 2: mod_base = OTHER; note = 2'-O-methyl ribonucleotide
  modified_base 3: mod_base = OTHER; note = 2'-O-methyl ribonucleotide
  modified_base 21: mod_base = OTHER; note = 2'-O-methyl ribonucleotide
  modified_base 28: mod_base = OTHER; note = 2'-O-methyl ribonucleotide
  modified_base 29: mod_base = OTHER; note = 2'-O-methyl ribonucleotide
  modified_base 30: mod_base = OTHER; note = 2'-O-methyl ribonucleotide
  modified_base 31: mod_base = OTHER; note = 2'-O-methyl ribonucleotide
  modified_base 32: mod_base = OTHER; note = 2'-O-methyl ribonucleotide
  modified_base 34: mod_base = OTHER; note = 2'-O-methyl ribonucleotide
  modified_base 35: mod_base = OTHER; note = 2'-O-methyl ribonucleotide
  modified_base 36: mod_base = OTHER; note = 2'-O-methyl ribonucleotide
  modified_base 37: mod_base = OTHER; note = 2'-O-methyl ribonucleotide
  modified_base 38: mod_base = OTHER; note = 2'-O-methyl ribonucleotide
  modified_base 39: mod_base = OTHER; note = 2'-O-methyl ribonucleotide
  modified_base 40: mod_base = OTHER; note = 2'-O-methyl ribonucleotide
  modified_base 41: mod_base = OTHER; note = 2'-O-methyl ribonucleotide
  modified_base 42: mod_base = OTHER; note = 2'-O-methyl ribonucleotide
  modified_base 46: mod_base = OTHER; note = 2'-O-methyl ribonucleotide
  modified_base 48: mod_base = OTHER; note = 2'-O-methyl ribonucleotide
  modified_base 50: mod_base = OTHER; note = 2'-O-methyl ribonucleotide
  modified_base 52: mod_base = OTHER; note = 2'-O-methyl ribonucleotide
  modified_base 53: mod_base = OTHER; note = 2'-O-methyl ribonucleotide
  modified_base 54: mod_base = OTHER; note = 2'-O-methyl ribonucleotide
  modified_base 55: mod_base = OTHER; note = 2'-O-methyl ribonucleotide
  modified_base 56: mod_base = OTHER; note = 2'-O-methyl ribonucleotide
  modified_base 57: mod_base = OTHER; note = 2'-O-methyl ribonucleotide
  modified_base 60: mod_base = OTHER; note = 2'-O-methyl ribonucleotide
  modified_base 61: mod_base = OTHER; note = 2'-O-methyl ribonucleotide
  modified_base 66: mod_base = OTHER; note = 2'-O-methyl ribonucleotide
  modified_base 67: mod_base = OTHER; note = 2'-O-methyl ribonucleotide
  modified_base 70: mod_base = OTHER; note = 2'-O-methyl ribonucleotide
  modified_base 71: mod_base = OTHER; note = 2'-O-methyl ribonucleotide
  modified_base 72: mod_base = OTHER; note = 2'-O-methyl ribonucleotide
  modified_base 74: mod_base = OTHER; note = 2'-O-methyl ribonucleotide
  modified_base 75: mod_base = OTHER; note = 2'-O-methyl ribonucleotide
  modified_base 76: mod_base = OTHER; note = 2'-O-methyl ribonucleotide
  modified_base 77: mod_base = OTHER; note = 2'-O-methyl ribonucleotide
  modified_base 78: mod_base = OTHER; note = 2'-O-methyl ribonucleotide
  modified_base 79: mod_base = OTHER; note = 2'-O-methyl ribonucleotide
  modified_base 80: mod_base = OTHER; note = 2'-O-methyl ribonucleotide
  modified_base 81: mod_base = OTHER; note = 2'-O-methyl ribonucleotide
  modified_base 83: mod_base = OTHER; note = 2'-O-methyl ribonucleotide
  modified_base 84: mod_base = OTHER; note = 2'-O-methyl ribonucleotide
  modified_base 85: mod_base = OTHER; note = 2'-O-methyl ribonucleotide
  modified_base 86: mod_base = OTHER; note = 2'-O-methyl ribonucleotide
  modified_base 87: mod_base = OTHER; note = 2'-O-methyl ribonucleotide
  modified_base 88: mod_base = OTHER; note = 2'-O-methyl ribonucleotide
  modified_base 89: mod_base = OTHER; note = 2'-O-methyl ribonucleotide
  modified_base 90: mod_base = OTHER; note = 2'-O-methyl ribonucleotide
  modified_base 91: mod_base = OTHER; note = 2'-O-methyl ribonucleotide
  modified_base 92: mod_base = OTHER; note = 2'-O-methyl ribonucleotide
  modified_base 93: mod_base = OTHER; note = 2'-O-methyl ribonucleotide
  modified_base 94: mod_base = OTHER; note = 2'-O-methyl ribonucleotide
  modified_base 95: mod_base = OTHER; note = 2'-O-methyl ribonucleotide
  modified_base 96: mod_base = OTHER; note = 2'-O-methyl ribonucleotide
  modified_base 97: mod_base = OTHER; note = 2'-O-methyl ribonucleotide
  modified_base 98: mod_base = OTHER; note = 2'-O-methyl ribonucleotide
  modified_base 99: mod_base = OTHER; note = 2'-O-methyl ribonucleotide
  modified_base 100: mod_base = OTHER; note = 2'-O-methyl ribonucleotide
  modified_base 101: mod_base = OTHER; note = uniform ribonucleotides (A, C, G, inosine or U), deoxynucleotides (A, G, C, inosine or T), ribonebularine, 2'-O-methylnebularine or deoxynebularine
  modified_base 102: mod_base = OTHER; note = uniform ribonucleotides (A, C, G, inosine or U), deoxynucleotides (A, G, C, inosine or T), ribonebularine, 2'-O-methylnebularine or deoxynebularine
  modified_base 103: mod_base = OTHER; note = uniform ribonucleotides (A, C, G, inosine or U), deoxynucleotides (A, G, C, inosine or T), ribonebularine, 2'-O-methylnebularine or deoxynebularine
  modified_base 1..3: mod_base = OTHER; note = phosphorothioate linkage
  modified_base 25..26: mod_base = OTHER; note = phosphorothioate linkage
  modified_base 45..46: mod_base = OTHER; note = phosphorothioate linkage
  modified_base 98..100: mod_base = OTHER; note = phosphorothioate linkage
  misc_feature 1..100: note = RNA
  misc_feature 101..103: note = Optionally DNA or RNA

SEQ ID NO: 3117 - DNA, 103 bp, synthetic construct; identical to SEQ ID NO: 1796
  source 1..103: mol_type = other DNA
  modified_base 1: mod_base = OTHER; note = 2'-O-methyl ribonucleotide
  modified_base 2: mod_base = OTHER; note = 2'-O-methyl ribonucleotide
  modified_base 3: mod_base = OTHER; note = 2'-O-methyl ribonucleotide
  modified_base 21: mod_base = OTHER; note = 2'-O-methyl ribonucleotide
  modified_base 28: mod_base = OTHER; note = 2'-O-methyl ribonucleotide
  modified_base 29: mod_base = OTHER; note = 2'-O-methyl ribonucleotide
  modified_base 30: mod_base = OTHER; note = 2'-O-methyl ribonucleotide
  modified_base 31: mod_base = OTHER; note = 2'-O-methyl ribonucleotide
  modified_base 32: mod_base = OTHER; note = 2'-O-methyl ribonucleotide
  modified_base 33: mod_base = OTHER; note = 2'-O-methyl ribonucleotide
  modified_base 34: mod_base = OTHER; note = 2'-O-methyl ribonucleotide
  modified_base 35: mod_base = OTHER; note = 2'-O-methyl ribonucleotide
  modified_base 36: mod_base = OTHER; note = 2'-O-methyl ribonucleotide
  modified_base 37: mod_base = OTHER; note = 2'-O-methyl ribonucleotide
  modified_base 38: mod_base = OTHER; note = 2'-O-methyl ribonucleotide
  modified_base 39: mod_base = OTHER; note = 2'-O-methyl ribonucleotide
  modified_base 40: mod_base = OTHER; note = 2'-O-methyl ribonucleotide
  modified_base 41: mod_base = OTHER; note = 2'-O-methyl ribonucleotide
  modified_base 42: mod_base = OTHER; note = 2'-O-methyl ribonucleotide
  modified_base 46: mod_base = OTHER; note = 2'-O-methyl ribonucleotide
  modified_base 48: mod_base = OTHER; note = 2'-O-methyl ribonucleotide
  modified_base 50: mod_base = OTHER; note = 2'-O-methyl ribonucleotide
  modified_base 52: mod_base = OTHER; note = 2'-O-methyl ribonucleotide
  modified_base 53: mod_base = OTHER; note = 2'-O-methyl ribonucleotide
  modified_base 54: mod_base = OTHER; note = 2'-O-methyl ribonucleotide
  modified_base 55: mod_base = OTHER; note = 2'-O-methyl ribonucleotide
  modified_base 56: mod_base = OTHER; note = 2'-O-methyl ribonucleotide
  modified_base 57: mod_base = OTHER; note = 2'-O-methyl ribonucleotide
  modified_base 60: mod_base = OTHER; note = 2'-O-methyl ribonucleotide
  modified_base 61: mod_base = OTHER; note = 2'-O-methyl ribonucleotide
  modified_base 66: mod_base = OTHER; note = 2'-O-methyl ribonucleotide
  modified_base 67: mod_base = OTHER; note = 2'-O-methyl ribonucleotide
  modified_base 70: mod_base = OTHER; note = 2'-O-methyl ribonucleotide
  modified_base 71: mod_base = OTHER; note = 2'-O-methyl ribonucleotide
  modified_base 72: mod_base = OTHER; note = 2'-O-methyl ribonucleotide
  modified_base 73: mod_base = OTHER; note = 2'-O-methyl ribonucleotide
  modified_base 74: mod_base = OTHER; note = 2'-O-methyl ribonucleotide
  modified_base 75: mod_base = OTHER; note = 2'-O-methyl ribonucleotide
  modified_base 76: mod_base = OTHER; note = 2'-O-methyl ribonucleotide
  modified_base 77: mod_base = OTHER; note = 2'-O-methyl ribonucleotide
  modified_base 78: mod_base = OTHER; note = 2'-O-methyl ribonucleotide
  modified_base 79: mod_base = OTHER; note = 2'-O-methyl ribonucleotide
  modified_base 80: mod_base = OTHER; note = 2'-O-methyl ribonucleotide
  modified_base 81: mod_base = OTHER; note = 2'-O-methyl ribonucleotide
  modified_base 83: mod_base = OTHER; note = 2'-O-methyl ribonucleotide
  modified_base 84: mod_base = OTHER; note = 2'-O-methyl ribonucleotide
  modified_base 85: mod_base = OTHER; note = 2'-O-methyl ribonucleotide
  modified_base 86: mod_base = OTHER; note = 2'-O-methyl ribonucleotide
  modified_base 87: mod_base = OTHER; note = 2'-O-methyl ribonucleotide
  modified_base 88: mod_base = OTHER; note = 2'-O-methyl ribonucleotide
  modified_base 89: mod_base = OTHER; note = 2'-O-methyl ribonucleotide
  modified_base 90: mod_base = OTHER; note = 2'-O-methyl ribonucleotide
  modified_base 91: mod_base = OTHER; note = 2'-O-methyl ribonucleotide
  modified_base 92: mod_base = OTHER; note = 2'-O-methyl ribonucleotide
  modified_base 93: mod_base = OTHER; note = 2'-O-methyl ribonucleotide
  modified_base 94: mod_base = OTHER; note = 2'-O-methyl ribonucleotide
  modified_base 95: mod_base = OTHER; note = 2'-O-methyl ribonucleotide
  modified_base 96: mod_base = OTHER; note = 2'-O-methyl ribonucleotide
  modified_base 97: mod_base = OTHER; note = 2'-O-methyl ribonucleotide
  modified_base 98: mod_base = OTHER; note = 2'-O-methyl ribonucleotide
  modified_base 99: mod_base = OTHER; note = 2'-O-methyl ribonucleotide
  modified_base 100: mod_base = OTHER; note = 2'-O-methyl ribonucleotide
  modified_base 101: mod_base = OTHER; note = uniform ribonucleotides (A, C, G, inosine or U), deoxynucleotides (A, G, C, inosine or T), ribonebularine, 2'-O-methylnebularine or deoxynebularine
  modified_base 102: mod_base = OTHER; note = uniform ribonucleotides (A, C, G, inosine or U), deoxynucleotides (A, G, C, inosine or T), ribonebularine, 2'-O-methylnebularine or deoxynebularine
  modified_base 103: mod_base = OTHER; note = uniform ribonucleotides (A, C, G, inosine or U), deoxynucleotides (A, G, C, inosine or T), ribonebularine, 2'-O-methylnebularine or deoxynebularine
  modified_base 1..3: mod_base = OTHER; note = phosphorothioate linkage
  modified_base 25..26: mod_base = OTHER; note = phosphorothioate linkage
  modified_base 45..46: mod_base = OTHER; note = phosphorothioate linkage
  modified_base 98..100: mod_base = OTHER; note = phosphorothioate linkage
  misc_feature 1..100: note = RNA
  misc_feature 101..103: note = Optionally DNA or RNA

SEQ ID NO: 3118 - DNA, 103 bp, synthetic construct; identical to SEQ ID NO: 1796
  source 1..103: mol_type = other DNA
  modified_base 1: mod_base = OTHER; note = 2'-O-methyl ribonucleotide
  modified_base 2: mod_base = OTHER; note = 2'-O-methyl ribonucleotide
  modified_base 3: mod_base = OTHER; note = 2'-O-methyl ribonucleotide
  modified_base 21: mod_base = OTHER; note = 2'-O-methyl ribonucleotide
  modified_base 28: mod_base = OTHER; note = 2'-O-methyl ribonucleotide
  modified_base 29: mod_base = OTHER; note = 2'-O-methyl ribonucleotide
  modified_base 30: mod_base = OTHER; note = 2'-O-methyl ribonucleotide
  modified_base 31: mod_base = OTHER; note = 2'-O-methyl ribonucleotide
  modified_base 32: mod_base = OTHER; note = 2'-O-methyl ribonucleotide
  modified_base 34: mod_base = OTHER; note = 2'-O-methyl ribonucleotide
  modified_base 35: mod_base = OTHER; note = 2'-O-methyl ribonucleotide
  modified_base 36: mod_base = OTHER; note = 2'-O-methyl ribonucleotide
  modified_base 37: mod_base = OTHER; note = 2'-O-methyl ribonucleotide
  modified_base 38: mod_base = OTHER; note = 2'-O-methyl ribonucleotide
  modified_base 39: mod_base = OTHER; note = 2'-O-methyl ribonucleotide
  modified_base 40: mod_base = OTHER; note = 2'-O-methyl ribonucleotide
  modified_base 41: mod_base = OTHER; note = 2'-O-methyl ribonucleotide
  modified_base 42: mod_base = OTHER; note = 2'-O-methyl ribonucleotide
  modified_base 46: mod_base = OTHER; note = 2'-O-methyl ribonucleotide
  modified_base 48: mod_base = OTHER; note = 2'-O-methyl ribonucleotide
  modified_base 50: mod_base = OTHER; note = 2'-O-methyl ribonucleotide
  modified_base 52: mod_base = OTHER; note = 2'-O-methyl ribonucleotide
  modified_base 53: mod_base = OTHER; note = 2'-O-methyl ribonucleotide
  modified_base 54: mod_base = OTHER; note = 2'-O-methyl ribonucleotide
  modified_base 55: mod_base = OTHER; note = 2'-O-methyl ribonucleotide
  modified_base 56: mod_base = OTHER; note = 2'-O-methyl ribonucleotide
  modified_base 57: mod_base = OTHER; note = 2'-O-methyl ribonucleotide
  modified_base 60: mod_base = OTHER; note = 2'-O-methyl ribonucleotide
  modified_base 61: mod_base = OTHER; note = 2'-O-methyl ribonucleotide
  modified_base 66: mod_base = OTHER; note = 2'-O-methyl ribonucleotide
  modified_base 67: mod_base = OTHER; note = 2'-O-methyl ribonucleotide
  modified_base 70: mod_base = OTHER; note = 2'-O-methyl ribonucleotide
  modified_base 71: mod_base = OTHER; note = 2'-O-methyl ribonucleotide
  modified_base 72: mod_base = OTHER; note = 2'-O-methyl ribonucleotide
  modified_base 74: mod_base = OTHER; note = 2'-O-methyl ribonucleotide
  modified_base 75: mod_base = OTHER; note = 2'-O-methyl ribonucleotide
  modified_base 76: mod_base = OTHER; note = 2'-O-methyl ribonucleotide
  modified_base 77: mod_base = OTHER; note = 2'-O-methyl ribonucleotide
  modified_base 78: mod_base = OTHER; note = 2'-O-methyl ribonucleotide
  modified_base 79: mod_base = OTHER; note = 2'-O-methyl ribonucleotide
  modified_base 80: mod_base = OTHER; note = 2'-O-methyl ribonucleotide
  modified_base 81: mod_base = OTHER; note = 2'-O-methyl ribonucleotide
  modified_base 83: mod_base = OTHER; note = 2'-O-methyl ribonucleotide
  modified_base 84: mod_base = OTHER; note = 2'-O-methyl ribonucleotide
  modified_base 85: mod_base = OTHER; note = 2'-O-methyl ribonucleotide
  modified_base 86: mod_base = OTHER; note = 2'-O-methyl ribonucleotide
  modified_base 87: mod_base = OTHER; note = 2'-O-methyl ribonucleotide
  modified_base 88: mod_base = OTHER; note = 2'-O-methyl ribonucleotide
  modified_base 89: mod_base = OTHER; note = 2'-O-methyl ribonucleotide
  modified_base 90: mod_base = OTHER; note = 2'-O-methyl ribonucleotide
  modified_base 91: mod_base = OTHER; note = 2'-O-methyl ribonucleotide
  modified_base 92: mod_base = OTHER; note = 2'-O-methyl ribonucleotide
  modified_base 93: mod_base = OTHER; note = 2'-O-methyl ribonucleotide
  modified_base 94: mod_base = OTHER; note = 2'-O-methyl ribonucleotide
  modified_base 95: mod_base = OTHER; note = 2'-O-methyl ribonucleotide
  modified_base 96: mod_base = OTHER; note = 2'-O-methyl ribonucleotide
  modified_base 97: mod_base = OTHER; note = 2'-O-methyl ribonucleotide
  modified_base 98: mod_base = OTHER; note = 2'-O-methyl ribonucleotide
  modified_base 99: mod_base = OTHER; note = 2'-O-methyl ribonucleotide
  modified_base 100: mod_base = OTHER; note = 2'-O-methyl ribonucleotide
  modified_base 101: mod_base = OTHER; note = uniform ribonucleotides (A, C, G, inosine or U), deoxynucleotides (A, G, C, inosine or T), ribonebularine, 2'-O-methylnebularine or deoxynebularine
  modified_base 102: mod_base = OTHER; note = uniform ribonucleotides (A, C, G, inosine or U), deoxynucleotides (A, G, C, inosine or T), ribonebularine, 2'-O-methylnebularine or deoxynebularine
  modified_base 103: mod_base = OTHER; note = uniform ribonucleotides (A, C, G, inosine or U), deoxynucleotides (A, G, C, inosine or T), ribonebularine, 2'-O-methylnebularine or deoxynebularine
  modified_base 1..3: mod_base = OTHER; note = phosphorothioate linkage
  modified_base 25..26: mod_base = OTHER; note = phosphorothioate linkage
  modified_base 45..46: mod_base = OTHER; note = phosphorothioate linkage
  modified_base 98..100: mod_base = OTHER; note = phosphorothioate linkage
  misc_feature 1..100: note = RNA
  misc_feature 101..103: note = Optionally DNA or RNA

SEQ ID NO: 3119 - DNA, 103 bp, synthetic construct; identical to SEQ ID NO: 1797
  source 1..103: mol_type = other DNA
  modified_base 1: mod_base = OTHER; note = 2'-O-methyl ribonucleotide
  modified_base 2: mod_base = OTHER; note = 2'-O-methyl ribonucleotide
  modified_base 3: mod_base = OTHER; note = 2'-O-methyl ribonucleotide
  modified_base 21: mod_base = OTHER; note = 2'-O-methyl ribonucleotide
  modified_base 28: mod_base = OTHER; note = 2'-O-methyl ribonucleotide
  modified_base 29: mod_base = OTHER; note = 2'-O-methyl ribonucleotide
  modified_base 30: mod_base = OTHER; note = 2'-O-methyl ribonucleotide
  modified_base 31: mod_base = OTHER; note = 2'-O-methyl ribonucleotide
  modified_base 32: mod_base = OTHER; note = 2'-O-methyl ribonucleotide
  modified_base 33: mod_base = OTHER; note = 2'-O-methyl ribonucleotide
  modified_base 34: mod_base = OTHER; note = 2'-O-methyl ribonucleotide
  modified_base 35: mod_base = OTHER; note = 2'-O-methyl ribonucleotide
  modified_base 36: mod_base = OTHER; note = 2'-O-methyl ribonucleotide
  modified_base 37: mod_base = OTHER; note = 2'-O-methyl ribonucleotide
  modified_base 38: mod_base = OTHER; note = 2'-O-methyl ribonucleotide
  modified_base 39: mod_base = OTHER; note = 2'-O-methyl ribonucleotide
  modified_base 40: mod_base = OTHER; note = 2'-O-methyl ribonucleotide
  modified_base 41: mod_base = OTHER; note = 2'-O-methyl ribonucleotide
  modified_base 42: mod_base = OTHER; note = 2'-O-methyl ribonucleotide
  modified_base 46: mod_base = OTHER; note = 2'-O-methyl ribonucleotide
  modified_base 48: mod_base = OTHER; note = 2'-O-methyl ribonucleotide
  modified_base 50: mod_base = OTHER; note = 2'-O-methyl ribonucleotide
  modified_base 52: mod_base = OTHER; note = 2'-O-methyl ribonucleotide
  modified_base 53: mod_base = OTHER; note = 2'-O-methyl ribonucleotide
  modified_base 54: mod_base = OTHER; note = 2'-O-methyl ribonucleotide
  modified_base 57: mod_base = OTHER; note = 2'-O-methyl ribonucleotide
  modified_base 61: mod_base = OTHER; note = 2'-O-methyl ribonucleotide
  modified_base 66: mod_base = OTHER; note = 2'-O-methyl ribonucleotide
  modified_base 67: mod_base = OTHER; note = 2'-O-methyl ribonucleotide
  modified_base 70: mod_base = OTHER; note = 2'-O-methyl ribonucleotide
  modified_base 71: mod_base = OTHER; note = 2'-O-methyl ribonucleotide
  modified_base 72: mod_base = OTHER; note = 2'-O-methyl ribonucleotide
  modified_base 74: mod_base = OTHER; note = 2'-O-methyl ribonucleotide
  modified_base 75: mod_base = OTHER; note = 2'-O-methyl ribonucleotide
  modified_base 76: mod_base = OTHER; note = 2'-O-methyl ribonucleotide
  modified_base 77: mod_base = OTHER; note = 2'-O-methyl ribonucleotide
  modified_base 78: mod_base = OTHER; note = 2'-O-methyl ribonucleotide
  modified_base 79: mod_base = OTHER; note = 2'-O-methyl ribonucleotide
  modified_base 80: mod_base = OTHER; note = 2'-O-methyl ribonucleotide
  modified_base 82: mod_base = OTHER; note = 2'-O-methyl ribonucleotide
  modified_base 83: mod_base = OTHER; note = 2'-O-methyl ribonucleotide
  modified_base 84: mod_base = OTHER; note = 2'-O-methyl ribonucleotide
  modified_base 85: mod_base = OTHER; note = 2'-O-methyl ribonucleotide
  modified_base 86: mod_base = OTHER; note = 2'-O-methyl ribonucleotide
  modified_base 87: mod_base = OTHER; note = 2'-O-methyl ribonucleotide
  modified_base 89: mod_base = OTHER; note = 2'-O-methyl ribonucleotide
  modified_base 92: mod_base = OTHER; note = 2'-O-methyl ribonucleotide
  modified_base 93: mod_base = OTHER; note = 2'-O-methyl ribonucleotide
  modified_base 94: mod_base = OTHER; note = 2'-O-methyl ribonucleotide
  modified_base 95: mod_base = OTHER; note = 2'-O-methyl ribonucleotide
  modified_base 96: mod_base = OTHER; note = 2'-O-methyl ribonucleotide
  modified_base 97: mod_base = OTHER; note = 2'-O-methyl ribonucleotide
  modified_base 98: mod_base = OTHER; note = 2'-O-methyl ribonucleotide
  modified_base 99: mod_base = OTHER; note = 2'-O-methyl ribonucleotide
  modified_base 100: mod_base = OTHER; note = 2'-O-methyl ribonucleotide
  modified_base 101: mod_base = OTHER; note = uniform ribonucleotides (A, C, G, inosine or U), deoxynucleotides (A, G, C, inosine or T), ribonebularine, 2'-O-methylnebularine or deoxynebularine
  modified_base 102: mod_base = OTHER; note = uniform ribonucleotides (A, C, G, inosine or U), deoxynucleotides (A, G, C, inosine or T), ribonebularine, 2'-O-methylnebularine or deoxynebularine
  modified_base 103: mod_base = OTHER; note = uniform ribonucleotides (A, C, G, inosine or U), deoxynucleotides (A, G, C, inosine or T), ribonebularine, 2'-O-methylnebularine or deoxynebularine
  modified_base 1..3: mod_base = OTHER; note = phosphorothioate linkage
  modified_base 25..26: mod_base = OTHER; note = phosphorothioate linkage
  modified_base 45..46: mod_base = OTHER; note = phosphorothioate linkage
  modified_base 98..100: mod_base = OTHER; note = phosphorothioate linkage
  misc_feature 1..100: note = RNA
  misc_feature 101..103: note = Optionally DNA or RNA

SEQ ID NO: 3120 - DNA, 103 bp, synthetic construct; identical to SEQ ID NO: 1797
  source 1..103: mol_type = other DNA
  modified_base 1: mod_base = OTHER; note = 2'-O-methyl ribonucleotide
  modified_base 2: mod_base = OTHER; note = 2'-O-methyl ribonucleotide
  modified_base 3: mod_base = OTHER; note = 2'-O-methyl ribonucleotide
  modified_base 21: mod_base = OTHER; note = 2'-O-methyl ribonucleotide
  modified_base 28: mod_base = OTHER; note = 2'-O-methyl ribonucleotide
  modified_base 29: mod_base = OTHER; note = 2'-O-methyl ribonucleotide
  modified_base 30: mod_base = OTHER; note = 2'-O-methyl ribonucleotide
  modified_base 31: mod_base = OTHER; note = 2'-O-methyl ribonucleotide
  modified_base 32: mod_base = OTHER; note = 2'-O-methyl ribonucleotide
  modified_base 33: mod_base = OTHER; note = 2'-O-methyl ribonucleotide
  modified_base 34: mod_base = OTHER; note = 2'-O-methyl ribonucleotide
  modified_base 35: mod_base = OTHER; note = 2'-O-methyl ribonucleotide
  modified_base 36: mod_base = OTHER; note = 2'-O-methyl ribonucleotide
  modified_base 37: mod_base = OTHER; note = 2'-O-methyl ribonucleotide
  modified_base 38: mod_base = OTHER; note = 2'-O-methyl ribonucleotide
  modified_base 39: mod_base = OTHER; note = 2'-O-methyl ribonucleotide
  modified_base 40: mod_base = OTHER; note = 2'-O-methyl ribonucleotide
  modified_base 41: mod_base = OTHER; note = 2'-O-methyl ribonucleotide
  modified_base 42: mod_base = OTHER; note = 2'-O-methyl ribonucleotide
  modified_base 46: mod_base = OTHER; note = 2'-O-methyl ribonucleotide
  modified_base 48: mod_base = OTHER; note = 2'-O-methyl ribonucleotide
  modified_base 50: mod_base = OTHER; note = 2'-O-methyl ribonucleotide
  modified_base 52: mod_base = OTHER; note = 2'-O-methyl ribonucleotide
  modified_base 53: mod_base = OTHER; note = 2'-O-methyl ribonucleotide
  modified_base 54: mod_base = OTHER; note = 2'-O-methyl ribonucleotide
  modified_base 55: mod_base = OTHER; note = 2'-O-methyl ribonucleotide
  modified_base 56: mod_base = OTHER; note = 2'-O-methyl ribonucleotide
  modified_base 57: mod_base = OTHER; note = 2'-O-methyl ribonucleotide
  modified_base 60: mod_base = OTHER; note = 2'-O-methyl ribonucleotide
  modified_base 61: mod_base = OTHER; note = 2'-O-methyl ribonucleotide
  modified_base 66: mod_base = OTHER; note = 2'-O-methyl ribonucleotide
  modified_base 67: mod_base = OTHER; note = 2'-O-methyl ribonucleotide
  modified_base 70: mod_base = OTHER; note = 2'-O-methyl ribonucleotide
  modified_base 71: mod_base = OTHER; note = 2'-O-methyl ribonucleotide
  modified_base 72: mod_base = OTHER; note = 2'-O-methyl ribonucleotide
  modified_base 74: mod_base = OTHER; note = 2'-O-methyl ribonucleotide
  modified_base 75: mod_base = OTHER; note = 2'-O-methyl ribonucleotide
  modified_base 76: mod_base = OTHER; note = 2'-O-methyl ribonucleotide
  modified_base 77: mod_base = OTHER; note = 2'-O-methyl ribonucleotide
  modified_base 78: mod_base = OTHER; note = 2'-O-methyl ribonucleotide
  modified_base 79: mod_base = OTHER; note = 2'-O-methyl ribonucleotide
  modified_base 80: mod_base = OTHER; note = 2'-O-methyl ribonucleotide
  modified_base 82: mod_base = OTHER; note = 2'-O-methyl ribonucleotide
  modified_base 83: mod_base = OTHER; note = 2'-O-methyl ribonucleotide
  modified_base 84: mod_base = OTHER; note = 2'-O-methyl ribonucleotide
  modified_base 85: mod_base = OTHER; note = 2'-O-methyl ribonucleotide
  modified_base 86: mod_base = OTHER; note = 2'-O-methyl ribonucleotide
  modified_base 87: mod_base = OTHER; note = 2'-O-methyl ribonucleotide
  modified_base 89: mod_base = OTHER; note = 2'-O-methyl ribonucleotide
  modified_base 92: mod_base = OTHER; note = 2'-O-methyl ribonucleotide
  modified_base 93: mod_base = OTHER; note = 2'-O-methyl ribonucleotide
  modified_base 94: mod_base = OTHER; note = 2'-O-methyl ribonucleotide
  modified_base 95: mod_base = OTHER; note = 2'-O-methyl ribonucleotide
  modified_base 96: mod_base = OTHER; note = 2'-O-methyl ribonucleotide
  modified_base 97: mod_base = OTHER; note = 2'-O-methyl ribonucleotide
  modified_base 98: mod_base = OTHER; note = 2'-O-methyl ribonucleotide
  modified_base 99: mod_base = OTHER; note = 2'-O-methyl ribonucleotide
  modified_base 100: mod_base = OTHER; note = 2'-O-methyl ribonucleotide
  modified_base 101: mod_base = OTHER; note = uniform ribonucleotides (A, C, G, inosine or U), deoxynucleotides (A, G, C, inosine or T), ribonebularine, 2'-O-methylnebularine or deoxynebularine
  modified_base 102: mod_base = OTHER; note = uniform ribonucleotides (A, C, G, inosine or U), deoxynucleotides (A, G, C, inosine or T), ribonebularine, 2'-O-methylnebularine or deoxynebularine
  modified_base 103: mod_base = OTHER; note = uniform ribonucleotides (A, C, G, inosine or U), deoxynucleotides (A, G, C, inosine or T), ribonebularine, 2'-O-methylnebularine or deoxynebularine
  modified_base 1..3: mod_base = OTHER; note = phosphorothioate linkage
  modified_base 25..26: mod_base = OTHER; note = phosphorothioate linkage
  modified_base 45..46: mod_base = OTHER; note = phosphorothioate linkage
  modified_base 98..100: mod_base = OTHER; note = phosphorothioate linkage
  misc_feature 1..100: note = RNA
  misc_feature 101..103: note = Optionally DNA or RNA

SEQ ID NO: 3121 - DNA, 103 bp, synthetic construct; identical to SEQ ID NO: 1797
  source 1..103: mol_type = other DNA
  modified_base 1: mod_base = OTHER; note = 2'-O-methyl ribonucleotide
  modified_base 2: mod_base = OTHER; note = 2'-O-methyl ribonucleotide
  modified_base 3: mod_base = OTHER; note = 2'-O-methyl ribonucleotide
  modified_base 21: mod_base = OTHER; note = 2'-O-methyl ribonucleotide
  modified_base 28: mod_base = OTHER; note = 2'-O-methyl ribonucleotide
  modified_base 29: mod_base = OTHER; note = 2'-O-methyl ribonucleotide
  modified_base 30: mod_base = OTHER; note = 2'-O-methyl ribonucleotide
  modified_base 31: mod_base = OTHER; note = 2'-O-methyl ribonucleotide
  modified_base 32: mod_base = OTHER; note = 2'-O-methyl ribonucleotide
  modified_base 33: mod_base = OTHER; note = 2'-O-methyl ribonucleotide
  modified_base 34: mod_base = OTHER; note = 2'-O-methyl ribonucleotide
  modified_base 35: mod_base = OTHER; note = 2'-O-methyl ribonucleotide
  modified_base 36: mod_base = OTHER; note = 2'-O-methyl ribonucleotide
  modified_base 37: mod_base = OTHER; note = 2'-O-methyl ribonucleotide
  modified_base 38: mod_base = OTHER; note = 2'-O-methyl ribonucleotide
  modified_base 39: mod_base = OTHER; note = 2'-O-methyl ribonucleotide
  modified_base 40: mod_base = OTHER; note = 2'-O-methyl ribonucleotide
  modified_base 41: mod_base = OTHER; note = 2'-O-methyl ribonucleotide
  modified_base 42: mod_base = OTHER; note = 2'-O-methyl ribonucleotide
  modified_base 46: mod_base = OTHER; note = 2'-O-methyl ribonucleotide
  modified_base 48: mod_base = OTHER; note = 2'-O-methyl ribonucleotide
  modified_base 50: mod_base = OTHER; note = 2'-O-methyl ribonucleotide
  modified_base 52: mod_base = OTHER; note = 2'-O-methyl ribonucleotide
  modified_base 53: mod_base = OTHER; note = 2'-O-methyl ribonucleotide
  modified_base 54: mod_base = OTHER; note = 2'-O-methyl ribonucleotide
  modified_base 57: mod_base = OTHER; note = 2'-O-methyl ribonucleotide
  modified_base 61: mod_base = OTHER; note = 2'-O-methyl ribonucleotide
  modified_base 66: mod_base = OTHER; note = 2'-O-methyl ribonucleotide
  modified_base 67: mod_base = OTHER; note = 2'-O-methyl ribonucleotide
  modified_base 70: mod_base = OTHER; note = 2'-O-methyl ribonucleotide
  modified_base 71: mod_base = OTHER; note = 2'-O-methyl ribonucleotide
  modified_base 72: mod_base = OTHER; note = 2'-O-methyl ribonucleotide
  modified_base 73: mod_base = OTHER; note = 2'-O-methyl ribonucleotide
  modified_base 74: mod_base = OTHER; note = 2'-O-methyl ribonucleotide
  modified_base 75: mod_base = OTHER; note = 2'-O-methyl ribonucleotide
  modified_base 76: mod_base = OTHER; note = 2'-O-methyl ribonucleotide
  modified_base 77: mod_base = OTHER; note = 2'-O-methyl ribonucleotide
  modified_base 78: mod_base = OTHER; note = 2'-O-methyl ribonucleotide
  modified_base 79: mod_base = OTHER; note = 2'-O-methyl ribonucleotide
  modified_base 80: mod_base = OTHER; note = 2'-O-methyl ribonucleotide
  modified_base 82: mod_base = OTHER; note = 2'-O-methyl ribonucleotide
  modified_base 83: mod_base = OTHER; note = 2'-O-methyl ribonucleotide
  modified_base 84: mod_base = OTHER; note = 2'-O-methyl ribonucleotide
  modified_base 85: mod_base = OTHER; note = 2'-O-methyl ribonucleotide
  modified_base 86: mod_base = OTHER; note = 2'-O-methyl ribonucleotide
  modified_base 87: mod_base = OTHER; note = 2'-O-methyl ribonucleotide
  modified_base 89: mod_base = OTHER; note = 2'-O-methyl ribonucleotide
  modified_base 92: mod_base = OTHER; note = 2'-O-methyl ribonucleotide
  modified_base 93: mod_base = OTHER; note = 2'-O-methyl ribonucleotide
  modified_base 94: mod_base = OTHER; note = 2'-O-methyl ribonucleotide
  modified_base 95: mod_base = OTHER; note = 2'-O-methyl ribonucleotide
  modified_base 96: mod_base = OTHER; note = 2'-O-methyl ribonucleotide
  modified_base 97: mod_base = OTHER; note = 2'-O-methyl ribonucleotide
  modified_base 98: mod_base = OTHER; note = 2'-O-methyl ribonucleotide
  modified_base 99: mod_base = OTHER; note = 2'-O-methyl ribonucleotide
  modified_base 100: mod_base = OTHER; note = 2'-O-methyl ribonucleotide
  modified_base 101: mod_base = OTHER; note = uniform ribonucleotides (A, C, G, inosine or U), deoxynucleotides (A, G, C, inosine or T), ribonebularine, 2'-O-methylnebularine or deoxynebularine
  modified_base 102: mod_base = OTHER; note = uniform ribonucleotides (A, C, G, inosine or U), deoxynucleotides (A, G, C, inosine or T), ribonebularine, 2'-O-methylnebularine or deoxynebularine
  modified_base 103: mod_base = OTHER; note = uniform ribonucleotides (A, C, G, inosine or U), deoxynucleotides (A, G, C, inosine or T), ribonebularine, 2'-O-methylnebularine or deoxynebularine
  modified_base 1..3: mod_base = OTHER; note = phosphorothioate linkage
  modified_base 25..26: mod_base = OTHER; note = phosphorothioate linkage
  modified_base 45..46: mod_base = OTHER; note = phosphorothioate linkage
  modified_base 98..100: mod_base = OTHER; note = phosphorothioate linkage
  misc_feature 1..100: note = RNA
  misc_feature 101..103: note = Optionally DNA or RNA

SEQ ID NO: 3122 - DNA, 103 bp, synthetic construct; identical to SEQ ID NO: 1797
  source 1..103: mol_type = other DNA
  modified_base 1: mod_base = OTHER; note = 2'-O-methyl ribonucleotide
  modified_base 2: mod_base = OTHER; note = 2'-O-methyl ribonucleotide
  modified_base 3: mod_base = OTHER; note = 2'-O-methyl ribonucleotide
  modified_base 21: mod_base = OTHER; note = 2'-O-methyl ribonucleotide
  modified_base 28: mod_base = OTHER; note = 2'-O-methyl ribonucleotide
  modified_base 29: mod_base = OTHER; note = 2'-O-methyl ribonucleotide
  modified_base 30: mod_base = OTHER; note = 2'-O-methyl ribonucleotide
  modified_base 31: mod_base = OTHER; note = 2'-O-methyl ribonucleotide
  modified_base 32: mod_base = OTHER; note = 2'-O-methyl ribonucleotide
  modified_base 33: mod_base = OTHER; note = 2'-O-methyl ribonucleotide
  modified_base 34: mod_base = OTHER; note = 2'-O-methyl ribonucleotide
  modified_base 35: mod_base = OTHER; note = 2'-O-methyl ribonucleotide
  modified_base 36: mod_base = OTHER; note = 2'-O-methyl ribonucleotide
  modified_base 37: mod_base = OTHER; note = 2'-O-methyl ribonucleotide
  modified_base 38: mod_base = OTHER; note = 2'-O-methyl ribonucleotide
  modified_base 39: mod_base = OTHER; note = 2'-O-methyl ribonucleotide
  modified_base 40: mod_base = OTHER; note = 2'-O-methyl ribonucleotide
  modified_base 41: mod_base = OTHER; note = 2'-O-methyl ribonucleotide
  modified_base 42: mod_base = OTHER; note = 2'-O-methyl ribonucleotide
  modified_base 46: mod_base = OTHER; note = 2'-O-methyl ribonucleotide
  modified_base 48: mod_base = OTHER; note = 2'-O-methyl ribonucleotide
  modified_base 50: mod_base = OTHER; note = 2'-O-methyl ribonucleotide
  modified_base 52: mod_base = OTHER; note = 2'-O-methyl ribonucleotide
  modified_base 53: mod_base = OTHER; note = 2'-O-methyl ribonucleotide
  modified_base 54: mod_base = OTHER; note = 2'-O-methyl ribonucleotide
  modified_base 57: mod_base = OTHER; note = 2'-O-methyl ribonucleotide
  modified_base 61: mod_base = OTHER; note = 2'-O-methyl ribonucleotide
  modified_base 66: mod_base = OTHER; note = 2'-O-methyl ribonucleotide
  modified_base 67: mod_base = OTHER; note = 2'-O-methyl ribonucleotide
  modified_base 70: mod_base = OTHER; note = 2'-O-methyl ribonucleotide
  modified_base 71: mod_base = OTHER; note = 2'-O-methyl ribonucleotide
  modified_base 72: mod_base = OTHER; note = 2'-O-methyl ribonucleotide
  modified_base 73: mod_base = OTHER; note = 2'-O-methyl ribonucleotide
  modified_base 74: mod_base = OTHER; note = 2'-O-methyl ribonucleotide
  modified_base 75: mod_base = OTHER; note = 2'-O-methyl ribonucleotide
  modified_base 76: mod_base = OTHER; note = 2'-O-methyl ribonucleotide
  modified_base 77: mod_base = OTHER; note = 2'-O-methyl ribonucleotide
  modified_base 78: mod_base = OTHER; note = 2'-O-methyl ribonucleotide
  modified_base 79: mod_base = OTHER; note = 2'-O-methyl ribonucleotide
  modified_base 80: mod_base = OTHER; note = 2'-O-methyl ribonucleotide
  modified_base 82: mod_base = OTHER; note = 2'-O-methyl ribonucleotide
  modified_base 83: mod_base = OTHER; note = 2'-O-methyl ribonucleotide
  modified_base 84: mod_base = OTHER; note = 2'-O-methyl ribonucleotide
  modified_base 85: mod_base = OTHER; note = 2'-O-methyl ribonucleotide
  modified_base 86: mod_base = OTHER; note = 2'-O-methyl ribonucleotide
  modified_base 87: mod_base = OTHER; note = 2'-O-methyl ribonucleotide
  modified_base 89: mod_base = OTHER; note = 2'-O-methyl ribonucleotide
  modified_base 91: mod_base = OTHER; note = 2'-O-methyl ribonucleotide
  modified_base 92: mod_base = OTHER; note = 2'-O-methyl ribonucleotide
  modified_base 93: mod_base = OTHER; note = 2'-O-methyl ribonucleotide
  modified_base 94: mod_base = OTHER; note = 2'-O-methyl ribonucleotide
  modified_base 95: mod_base = OTHER; note = 2'-O-methyl ribonucleotide
  modified_base 96: mod_base = OTHER; note = 2'-O-methyl ribonucleotide
  modified_base 97: mod_base = OTHER; note = 2'-O-methyl ribonucleotide
  modified_base 98: mod_base = OTHER; note = 2'-O-methyl ribonucleotide
  modified_base 99: mod_base = OTHER; note = 2'-O-methyl ribonucleotide
  modified_base 100: mod_base = OTHER; note = 2'-O-methyl ribonucleotide
  modified_base 101: mod_base = OTHER; note = uniform ribonucleotides (A, C, G, inosine or U), deoxynucleotides (A, G, C, inosine or T), ribonebularine, 2'-O-methylnebularine or deoxynebularine
  modified_base 102: mod_base = OTHER; note = uniform ribonucleotides (A, C, G, inosine or U), deoxynucleotides (A, G, C, inosine or T), ribonebularine, 2'-O-methylnebularine or deoxynebularine
  modified_base 103: mod_base = OTHER; note = uniform ribonucleotides (A, C, G, inosine or U), deoxynucleotides (A, G, C, inosine or T), ribonebularine, 2'-O-methylnebularine or deoxynebularine
  modified_base 1..3: mod_base = OTHER; note = phosphorothioate linkage
  modified_base 25..26: mod_base = OTHER; note = phosphorothioate linkage
  modified_base 45..46: mod_base = OTHER; note = phosphorothioate linkage
  modified_base 98..100: mod_base = OTHER; note = phosphorothioate linkage
  misc_feature 1..100: note = RNA
  misc_feature 101..103: note = Optionally DNA or RNA

SEQ ID NO: 3123 - DNA, 103 bp, synthetic construct; identical to SEQ ID NO: 1797
  source 1..103: mol_type = other DNA
  modified_base 1: mod_base = OTHER; note = 2'-O-methyl ribonucleotide
  modified_base 2: mod_base = OTHER; note = 2'-O-methyl ribonucleotide
  modified_base 3: mod_base = OTHER; note = 2'-O-methyl ribonucleotide
  modified_base 21: mod_base = OTHER; note = 2'-O-methyl ribonucleotide
  modified_base 28: mod_base = OTHER; note = 2'-O-methyl ribonucleotide
  modified_base 29: mod_base = OTHER; note = 2'-O-methyl ribonucleotide
  modified_base 30: mod_base = OTHER; note = 2'-O-methyl ribonucleotide
  modified_base 31: mod_base = OTHER; note = 2'-O-methyl ribonucleotide
  modified_base 32: mod_base = OTHER; note = 2'-O-methyl ribonucleotide
  modified_base 34: mod_base = OTHER; note = 2'-O-methyl ribonucleotide
  modified_base 35: mod_base = OTHER; note = 2'-O-methyl ribonucleotide
  modified_base 36: mod_base = OTHER; note = 2'-O-methyl ribonucleotide
  modified_base 37: mod_base = OTHER; note = 2'-O-methyl ribonucleotide
  modified_base 38: mod_base = OTHER; note = 2'-O-methyl ribonucleotide
  modified_base 39: mod_base = OTHER; note = 2'-O-methyl ribonucleotide
  modified_base 40: mod_base = OTHER; note = 2'-O-methyl ribonucleotide
  modified_base 41: mod_base = OTHER; note = 2'-O-methyl ribonucleotide
  modified_base 42: mod_base = OTHER; note = 2'-O-methyl ribonucleotide
  modified_base 46: mod_base = OTHER; note = 2'-O-methyl ribonucleotide
  modified_base 48: mod_base = OTHER; note = 2'-O-methyl ribonucleotide
  modified_base 50: mod_base = OTHER; note = 2'-O-methyl ribonucleotide
  modified_base 52: mod_base = OTHER; note = 2'-O-methyl ribonucleotide
  modified_base 53: mod_base = OTHER; note = 2'-O-methyl ribonucleotide
  modified_base 54: mod_base = OTHER; note = 2'-O-methyl ribonucleotide
  modified_base 57: mod_base = OTHER; note = 2'-O-methyl ribonucleotide
  modified_base 61: mod_base = OTHER; note = 2'-O-methyl ribonucleotide
  modified_base 66: mod_base = OTHER; note = 2'-O-methyl ribonucleotide
  modified_base 67: mod_base = OTHER; note = 2'-O-methyl ribonucleotide
  modified_base 70: mod_base = OTHER; note = 2'-O-methyl ribonucleotide
  modified_base 71: mod_base = OTHER; note = 2'-O-methyl ribonucleotide
  modified_base 72: mod_base = OTHER; note = 2'-O-methyl ribonucleotide
  modified_base 73: mod_base = OTHER; note = 2'-O-methyl ribonucleotide
  modified_base 74: mod_base = OTHER; note = 2'-O-methyl ribonucleotide
  modified_base 75: mod_base = OTHER; note = 2'-O-methyl ribonucleotide
  modified_base 76: mod_base = OTHER; note = 2'-O-methyl ribonucleotide
  modified_base 77: mod_base = OTHER; note = 2'-O-methyl ribonucleotide
  modified_base 78: mod_base = OTHER; note = 2'-O-methyl ribonucleotide
  modified_base 79: mod_base = OTHER; note = 2'-O-methyl ribonucleotide
  modified_base 80: mod_base = OTHER; note = 2'-O-methyl ribonucleotide
  modified_base 82: mod_base = OTHER; note = 2'-O-methyl ribonucleotide
  modified_base 83: mod_base = OTHER; note = 2'-O-methyl ribonucleotide
  modified_base 84: mod_base = OTHER; note = 2'-O-methyl ribonucleotide
  modified_base 85: mod_base = OTHER; note = 2'-O-methyl ribonucleotide
  modified_base 86: mod_base = OTHER; note = 2'-O-methyl ribonucleotide
  modified_base 87: mod_base = OTHER; note = 2'-O-methyl ribonucleotide
  modified_base 89: mod_base = OTHER; note = 2'-O-methyl ribonucleotide
  modified_base 92: mod_base = OTHER; note = 2'-O-methyl ribonucleotide
  modified_base 93: mod_base = OTHER; note = 2'-O-methyl ribonucleotide
  modified_base 94: mod_base = OTHER; note = 2'-O-methyl ribonucleotide
  modified_base 95: mod_base = OTHER; note = 2'-O-methyl ribonucleotide
  modified_base 96: mod_base = OTHER; note = 2'-O-methyl ribonucleotide
  modified_base 97: mod_base = OTHER; note = 2'-O-methyl ribonucleotide
  modified_base 98: mod_base = OTHER; note = 2'-O-methyl ribonucleotide
  modified_base 99: mod_base = OTHER; note = 2'-O-methyl ribonucleotide
  modified_base 100: mod_base = OTHER; note = 2'-O-methyl ribonucleotide
  modified_base 101: mod_base = OTHER; note = uniform ribonucleotides (A, C, G, inosine or U), deoxynucleotides (A, G, C, inosine or T), ribonebularine, 2'-O-methylnebularine or deoxynebularine
  modified_base 102: mod_base = OTHER; note = uniform ribonucleotides (A, C, G, inosine or U), deoxynucleotides (A, G, C, inosine or T), ribonebularine, 2'-O-methylnebularine or deoxynebularine
  modified_base 103: mod_base = OTHER; note = uniform ribonucleotides (A, C, G, inosine or U), deoxynucleotides (A, G, C, inosine or T), ribonebularine, 2'-O-methylnebularine or deoxynebularine
  modified_base 1..3: mod_base = OTHER; note = phosphorothioate linkage
  modified_base 25..26: mod_base = OTHER; note = phosphorothioate linkage
  modified_base 45..46: mod_base = OTHER; note = phosphorothioate linkage
  modified_base 98..100: mod_base = OTHER; note = phosphorothioate linkage
  misc_feature 1..100: note = RNA
  misc_feature 101..103: note = Optionally DNA or RNA

SEQ ID NO: 3124 - DNA, 103 bp, synthetic construct; identical to SEQ ID NO: 1797
  source 1..103: mol_type = other DNA
  modified_base 1: mod_base = OTHER; note = 2'-O-methyl ribonucleotide
  modified_base 2: mod_base = OTHER; note = 2'-O-methyl ribonucleotide
  modified_base 3: mod_base = OTHER; note = 2'-O-methyl ribonucleotide
  modified_base 21: mod_base = OTHER; note = 2'-O-methyl ribonucleotide
  modified_base 28: mod_base = OTHER; note = 2'-O-methyl ribonucleotide
  modified_base 29: mod_base = OTHER; note = 2'-O-methyl ribonucleotide
  modified_base 30: mod_base = OTHER; note = 2'-O-methyl ribonucleotide
  modified_base 31: mod_base = OTHER; note = 2'-O-methyl ribonucleotide
  modified_base 32: mod_base = OTHER; note = 2'-O-methyl ribonucleotide
  modified_base 34: mod_base = OTHER; note = 2'-O-methyl ribonucleotide
  modified_base 35: mod_base = OTHER; note = 2'-O-methyl ribonucleotide
  modified_base 36: mod_base = OTHER; note = 2'-O-methyl ribonucleotide
  modified_base 37: mod_base = OTHER; note = 2'-O-methyl ribonucleotide
  modified_base 38: mod_base = OTHER; note = 2'-O-methyl ribonucleotide
  modified_base 39: mod_base = OTHER; note = 2'-O-methyl ribonucleotide
  modified_base 40: mod_base = OTHER; note = 2'-O-methyl ribonucleotide
  modified_base 41: mod_base = OTHER; note = 2'-O-methyl ribonucleotide
  modified_base 42: mod_base = OTHER; note = 2'-O-methyl ribonucleotide
  modified_base 46: mod_base = OTHER; note = 2'-O-methyl ribonucleotide
  modified_base 48: mod_base = OTHER; note = 2'-O-methyl ribonucleotide
  modified_base 50: mod_base = OTHER; note = 2'-O-methyl ribonucleotide
  modified_base 52: mod_base = OTHER; note = 2'-O-methyl ribonucleotide
  modified_base 53: mod_base = OTHER; note = 2'-O-methyl ribonucleotide
  modified_base 54: mod_base = OTHER; note = 2'-O-methyl ribonucleotide
  modified_base 57: mod_base = OTHER; note = 2'-O-methyl ribonucleotide
  modified_base 61: mod_base = OTHER; note = 2'-O-methyl ribonucleotide
  modified_base 66: mod_base = OTHER; note = 2'-O-methyl ribonucleotide
  modified_base 67: mod_base = OTHER; note = 2'-O-methyl ribonucleotide
  modified_base 70: mod_base = OTHER; note = 2'-O-methyl ribonucleotide
  modified_base 71: mod_base = OTHER; note = 2'-O-methyl ribonucleotide
  modified_base 72: mod_base = OTHER; note = 2'-O-methyl ribonucleotide
  modified_base 73: mod_base = OTHER; note = 2'-O-methyl ribonucleotide
  modified_base 74: mod_base = OTHER; note = 2'-O-methyl ribonucleotide
  modified_base 75: mod_base = OTHER; note = 2'-O-methyl ribonucleotide
  modified_base 76: mod_base = OTHER; note = 2'-O-methyl ribonucleotide
  modified_base 77: mod_base = OTHER; note = 2'-O-methyl ribonucleotide
  modified_base 78: mod_base = OTHER; note = 2'-O-methyl ribonucleotide
  modified_base 79: mod_base = OTHER; note = 2'-O-methyl ribonucleotide
  modified_base 80: mod_base = OTHER; note = 2'-O-methyl ribonucleotide
  modified_base 82: mod_base = OTHER; note = 2'-O-methyl ribonucleotide
  modified_base 83: mod_base = OTHER; note = 2'-O-methyl ribonucleotide
  modified_base 84: mod_base = OTHER; note = 2'-O-methyl ribonucleotide
  modified_base 85: mod_base = OTHER; note = 2'-O-methyl ribonucleotide
  modified_base 86: mod_base = OTHER; note = 2'-O-methyl ribonucleotide
  modified_base 87: mod_base = OTHER; note = 2'-O-methyl ribonucleotide
  modified_base 89: mod_base = OTHER; note = 2'-O-methyl ribonucleotide
  modified_base 91: mod_base = OTHER; note = 2'-O-methyl ribonucleotide
  modified_base 92: mod_base = OTHER; note = 2'-O-methyl ribonucleotide
  modified_base 93: mod_base = OTHER; note = 2'-O-methyl ribonucleotide
  modified_base 94: mod_base = OTHER; note = 2'-O-methyl ribonucleotide
  modified_base 95: mod_base = OTHER; note = 2'-O-methyl ribonucleotide
  modified_base 96: mod_base = OTHER; note = 2'-O-methyl ribonucleotide
  modified_base 97: mod_base = OTHER; note = 2'-O-methyl ribonucleotide
  modified_base 98: mod_base = OTHER; note = 2'-O-methyl ribonucleotide
  modified_base 99: mod_base = OTHER; note = 2'-O-methyl ribonucleotide
  modified_base 100: mod_base = OTHER; note = 2'-O-methyl ribonucleotide
  modified_base 101: mod_base = OTHER; note = uniform ribonucleotides (A, C, G, inosine or U), deoxynucleotides (A, G, C, inosine or T), ribonebularine, 2'-O-methylnebularine or deoxynebularine
  modified_base 102: mod_base = OTHER; note = uniform ribonucleotides (A, C, G, inosine or U), deoxynucleotides (A, G, C, inosine or T), ribonebularine, 2'-O-methylnebularine or deoxynebularine
  modified_base 103: mod_base = OTHER; note = uniform ribonucleotides (A, C, G, inosine or U), deoxynucleotides (A, G, C, inosine or T), ribonebularine, 2'-O-methylnebularine or deoxynebularine
  modified_base 1..3: mod_base = OTHER; note = phosphorothioate linkage
  modified_base 25..26: mod_base = OTHER; note = phosphorothioate linkage
  modified_base 45..46: mod_base = OTHER; note = phosphorothioate linkage
  modified_base 98..100: mod_base = OTHER; note = phosphorothioate linkage
  misc_feature 1..100: note = RNA
  misc_feature 101..103: note = Optionally DNA or RNA

SEQ ID NO: 3125 - DNA, 103 bp, synthetic construct; identical to SEQ ID NO: 1797
  source 1..103: mol_type = other DNA
  modified_base 1: mod_base = OTHER; note = 2'-O-methyl ribonucleotide
  modified_base 2: mod_base = OTHER; note = 2'-O-methyl ribonucleotide
  modified_base 3: mod_base = OTHER; note = 2'-O-methyl ribonucleotide
  modified_base 21: mod_base = OTHER; note = 2'-O-methyl ribonucleotide
  modified_base 28: mod_base = OTHER; note = 2'-O-methyl ribonucleotide
  modified_base 29: mod_base = OTHER; note = 2'-O-methyl ribonucleotide
  modified_base 30: mod_base = OTHER; note = 2'-O-methyl ribonucleotide
  modified_base 31: mod_base = OTHER; note = 2'-O-methyl ribonucleotide
  modified_base 32: mod_base = OTHER; note = 2'-O-methyl ribonucleotide
  modified_base 34: mod_base = OTHER; note = 2'-O-methyl ribonucleotide
  modified_base 35: mod_base = OTHER; note = 2'-O-methyl ribonucleotide
  modified_base 36: mod_base = OTHER; note = 2'-O-methyl ribonucleotide
  modified_base 37: mod_base = OTHER; note = 2'-O-methyl ribonucleotide
  modified_base 38: mod_base = OTHER; note = 2'-O-methyl ribonucleotide
  modified_base 39: mod_base = OTHER; note = 2'-O-methyl ribonucleotide
  modified_base 40: mod_base = OTHER; note = 2'-O-methyl ribonucleotide
  modified_base 41: mod_base = OTHER; note = 2'-O-methyl ribonucleotide
  modified_base 42: mod_base = OTHER; note = 2'-O-methyl ribonucleotide
  modified_base 46: mod_base = OTHER; note = 2'-O-methyl ribonucleotide
  modified_base 48: mod_base = OTHER; note = 2'-O-methyl ribonucleotide
  modified_base 50: mod_base = OTHER; note = 2'-O-methyl ribonucleotide
  modified_base 52: mod_base = OTHER; note = 2'-O-methyl ribonucleotide
  modified_base 53: mod_base = OTHER; note = 2'-O-methyl ribonucleotide
  modified_base 54: mod_base = OTHER; note = 2'-O-methyl ribonucleotide
  modified_base 55: mod_base = OTHER; note = 2'-O-methyl ribonucleotide
  modified_base 56: mod_base = OTHER; note = 2'-O-methyl ribonucleotide
  modified_base 57: mod_base = OTHER; note = 2'-O-methyl ribonucleotide
  modified_base 60: mod_base = OTHER; note = 2'-O-methyl ribonucleotide
  modified_base 61: mod_base = OTHER; note = 2'-O-methyl ribonucleotide
  modified_base 66: mod_base = OTHER; note = 2'-O-methyl ribonucleotide
  modified_base 67: mod_base = OTHER; note = 2'-O-methyl ribonucleotide
  modified_base 70: mod_base = OTHER; note = 2'-O-methyl ribonucleotide
  modified_base 71: mod_base = OTHER; note = 2'-O-methyl ribonucleotide
  modified_base 72: mod_base = OTHER; note = 2'-O-methyl ribonucleotide
  modified_base 74: mod_base = OTHER; note = 2'-O-methyl ribonucleotide
  modified_base 75: mod_base = OTHER; note = 2'-O-methyl ribonucleotide
  modified_base 76: mod_base = OTHER; note = 2'-O-methyl ribonucleotide
  modified_base 77: mod_base = OTHER; note = 2'-O-methyl ribonucleotide
  modified_base 78: mod_base = OTHER; note = 2'-O-methyl ribonucleotide
  modified_base 79: mod_base = OTHER; note = 2'-O-methyl ribonucleotide
  modified_base 80: mod_base = OTHER; note = 2'-O-methyl ribonucleotide
  modified_base 82: mod_base = OTHER; note = 2'-O-methyl ribonucleotide
  modified_base 83: mod_base = OTHER; note = 2'-O-methyl ribonucleotide
  modified_base 84: mod_base = OTHER; note = 2'-O-methyl ribonucleotide
  modified_base 85: mod_base = OTHER; note = 2'-O-methyl ribonucleotide
  modified_base 86: mod_base = OTHER; note = 2'-O-methyl ribonucleotide
  modified_base 87: mod_base = OTHER; note = 2'-O-methyl ribonucleotide
  modified_base 89: mod_base = OTHER; note = 2'-O-methyl ribonucleotide
  modified_base 92: mod_base = OTHER; note = 2'-O-methyl ribonucleotide
  modified_base 93: mod_base = OTHER; note = 2'-O-methyl ribonucleotide
  modified_base 94: mod_base = OTHER; note = 2'-O-methyl ribonucleotide
  modified_base 95: mod_base = OTHER; note = 2'-O-methyl ribonucleotide
  modified_base 96: mod_base = OTHER; note = 2'-O-methyl ribonucleotide
  modified_base 97: mod_base = OTHER; note = 2'-O-methyl ribonucleotide
  modified_base 98: mod_base = OTHER; note = 2'-O-methyl ribonucleotide
  modified_base 99: mod_base = OTHER; note = 2'-O-methyl ribonucleotide
  modified_base 100: mod_base = OTHER; note = 2'-O-methyl ribonucleotide
  modified_base 101: mod_base = OTHER; note = uniform ribonucleotides (A, C, G, inosine or U), deoxynucleotides (A, G, C, inosine or T), ribonebularine, 2'-O-methylnebularine or deoxynebularine
  modified_base 102: mod_base = OTHER; note = uniform ribonucleotides (A, C, G, inosine or U), deoxynucleotides (A, G, C, inosine or T), ribonebularine, 2'-O-methylnebularine or deoxynebularine
  modified_base 103: mod_base = OTHER; note = uniform ribonucleotides (A, C, G, inosine or U), deoxynucleotides (A, G, C, inosine or T), ribonebularine, 2'-O-methylnebularine or deoxynebularine
  modified_base 1..3: mod_base = OTHER; note = phosphorothioate linkage
  modified_base 25..26: mod_base = OTHER; note = phosphorothioate linkage
  modified_base 45..46: mod_base = OTHER; note = phosphorothioate linkage
  modified_base 98..100: mod_base = OTHER; note = phosphorothioate linkage
  misc_feature 1..100: note = RNA
  misc_feature 101..103: note = Optionally DNA or RNA

SEQ ID NO: 3126 - DNA, 103 bp, synthetic construct; identical to SEQ ID NO: 1795
  source 1..103: mol_type = other DNA
  modified_base 1: mod_base = OTHER; note = 2'-O-methyl ribonucleotide
  modified_base 2: mod_base = OTHER; note = 2'-O-methyl ribonucleotide
  modified_base 3: mod_base = OTHER; note = 2'-O-methyl ribonucleotide
  modified_base 21: mod_base = OTHER; note = 2'-O-methyl ribonucleotide
  modified_base 28: mod_base = OTHER; note = 2'-O-methyl ribonucleotide
  modified_base 29: mod_base = OTHER; note = 2'-O-methyl ribonucleotide
  modified_base 30: mod_base = OTHER; note = 2'-O-methyl ribonucleotide
  modified_base 31: mod_base = OTHER; note = 2'-O-methyl ribonucleotide
  modified_base 32: mod_base = OTHER; note = 2'-O-methyl ribonucleotide
  modified_base 33: mod_base = OTHER; note = 2'-O-methyl ribonucleotide
  modified_base 34: mod_base = OTHER; note = 2'-O-methyl ribonucleotide
  modified_base 35: mod_base = OTHER; note = 2'-O-methyl ribonucleotide
  modified_base 36: mod_base = OTHER; note = 2'-O-methyl ribonucleotide
  modified_base 37: mod_base = OTHER; note = 2'-O-methyl ribonucleotide
  modified_base 38: mod_base = OTHER; note = 2'-O-methyl ribonucleotide
  modified_base 39: mod_base = OTHER; note = 2'-O-methyl ribonucleotide
  modified_base 40: mod_base = OTHER; note = 2'-O-methyl ribonucleotide
  modified_base 41: mod_base = OTHER; note = 2'-O-methyl ribonucleotide
  modified_base 42: mod_base = OTHER; note = 2'-O-methyl ribonucleotide
  modified_base 46: mod_base = OTHER; note = 2'-O-methyl ribonucleotide
  modified_base 48: mod_base = OTHER; note = 2'-O-methyl ribonucleotide
  modified_base 50: mod_base = OTHER; note = 2'-O-methyl ribonucleotide
  modified_base 52: mod_base = OTHER; note = 2'-O-methyl ribonucleotide
  modified_base 53: mod_base = OTHER; note = 2'-O-methyl ribonucleotide
  modified_base 54: mod_base = OTHER; note = 2'-O-methyl ribonucleotide
  modified_base 55: mod_base = OTHER; note = 2'-O-methyl ribonucleotide
  modified_base 56: mod_base = OTHER; note = 2'-O-methyl ribonucleotide
  modified_base 57: mod_base = OTHER; note = 2'-O-methyl ribonucleotide
  modified_base 60: mod_base = OTHER; note = 2'-O-methyl ribonucleotide
  modified_base 61: mod_base = OTHER; note = 2'-O-methyl ribonucleotide
  modified_base 66: mod_base = OTHER; note = 2'-O-methyl ribonucleotide
  modified_base 67: mod_base = OTHER; note = 2'-O-methyl ribonucleotide
  modified_base 70: mod_base = OTHER; note = 2'-O-methyl ribonucleotide
  modified_base 71: mod_base = OTHER; note = 2'-O-methyl ribonucleotide
  modified_base 72: mod_base = OTHER; note = 2'-O-methyl ribonucleotide
  modified_base 73: mod_base = OTHER; note = 2'-O-methyl ribonucleotide
  modified_base 74: mod_base = OTHER; note = 2'-O-methyl ribonucleotide
  modified_base 75: mod_base = OTHER; note = 2'-O-methyl ribonucleotide
  modified_base 76: mod_base = OTHER; note = 2'-O-methyl ribonucleotide
  modified_base 77: mod_base = OTHER; note = 2'-O-methyl ribonucleotide
  modified_base 78: mod_base = OTHER; note = 2'-O-methyl ribonucleotide
  modified_base 79: mod_base = OTHER; note = 2'-O-methyl ribonucleotide
  modified_base 80: mod_base = OTHER; note = 2'-O-methyl ribonucleotide
  modified_base 81: mod_base = OTHER; note = 2'-O-methyl ribonucleotide
  modified_base 83: mod_base = OTHER; note = 2'-O-methyl ribonucleotide
  modified_base 84: mod_base = OTHER; note = 2'-O-methyl ribonucleotide
  modified_base 85: mod_base = OTHER; note = 2'-O-methyl ribonucleotide
  modified_base 86: mod_base = OTHER; note = 2'-O-methyl ribonucleotide
  modified_base 87: mod_base = OTHER; note = 2'-O-methyl ribonucleotide
  modified_base 88: mod_base = OTHER; note = 2'-O-methyl ribonucleotide
  modified_base 89: mod_base = OTHER; note = 2'-O-methyl ribonucleotide
  modified_base 90: mod_base = OTHER; note = 2'-O-methyl ribonucleotide
  modified_base 91: mod_base = OTHER; note = 2'-O-methyl ribonucleotide
  modified_base 92: mod_base = OTHER; note = 2'-O-methyl ribonucleotide
  modified_base 93: mod_base = OTHER; note = 2'-O-methyl ribonucleotide
  modified_base 94: mod_base = OTHER; note = 2'-O-methyl ribonucleotide
  modified_base 95: mod_base = OTHER; note = 2'-O-methyl ribonucleotide
  modified_base 96: mod_base = OTHER; note = 2'-O-methyl ribonucleotide
  modified_base 97: mod_base = OTHER; note = 2'-O-methyl ribonucleotide
  modified_base 98: mod_base = OTHER; note = 2'-O-methyl ribonucleotide
  modified_base 99: mod_base = OTHER; note = 2'-O-methyl ribonucleotide
  modified_base 100: mod_base = OTHER; note = 2'-O-methyl ribonucleotide
  modified_base 101: mod_base = OTHER; note = uniform ribonucleotides (A, C, G, inosine or U), deoxynucleotides (A, G, C, inosine or T), ribonebularine, 2'-O-methylnebularine or deoxynebularine
  modified_base 102: mod_base = OTHER; note = uniform ribonucleotides (A, C, G, inosine or U), deoxynucleotides (A, G, C, inosine or T), ribonebularine, 2'-O-methylnebularine or deoxynebularine
  modified_base 103: mod_base = OTHER; note = uniform ribonucleotides (A, C, G, inosine or U), deoxynucleotides (A, G, C, inosine or T), ribonebularine, 2'-O-methylnebularine or deoxynebularine
  modified_base 1..3: mod_base = OTHER; note = phosphorothioate linkage
  modified_base 25..26: mod_base = OTHER; note = phosphorothioate linkage
  modified_base 64..65: mod_base = OTHER; note = phosphorothioate linkage
  modified_base 98..100: mod_base = OTHER; note = phosphorothioate linkage
  misc_feature 1..100: note = RNA
  misc_feature 101..103: note = Optionally DNA or RNA

SEQ ID NO: 3127 - DNA, 103 bp, synthetic construct; identical to SEQ ID NO: 1795
  source 1..103: mol_type = other DNA
  modified_base 1: mod_base = OTHER; note = 2'-O-methyl ribonucleotide
  modified_base 2: mod_base = OTHER; note = 2'-O-methyl ribonucleotide
  modified_base 3: mod_base = OTHER; note = 2'-O-methyl ribonucleotide
  modified_base 21: mod_base = OTHER; note = 2'-O-methyl ribonucleotide
  modified_base 28: mod_base = OTHER; note = 2'-O-methyl ribonucleotide
  modified_base 29: mod_base = OTHER; note = 2'-O-methyl ribonucleotide
  modified_base 30: mod_base = OTHER; note = 2'-O-methyl ribonucleotide
  modified_base 31: mod_base = OTHER; note = 2'-O-methyl ribonucleotide
  modified_base 32: mod_base = OTHER; note = 2'-O-methyl ribonucleotide
  modified_base 34: mod_base = OTHER; note = 2'-O-methyl ribonucleotide
  modified_base 35: mod_base = OTHER; note = 2'-O-methyl ribonucleotide
  modified_base 36: mod_base = OTHER; note = 2'-O-methyl ribonucleotide
  modified_base 37: mod_base = OTHER; note = 2'-O-methyl ribonucleotide
  modified_base 38: mod_base = OTHER; note = 2'-O-methyl ribonucleotide
  modified_base 39: mod_base = OTHER; note = 2'-O-methyl ribonucleotide
  modified_base 40: mod_base = OTHER; note = 2'-O-methyl ribonucleotide
  modified_base 41: mod_base = OTHER; note = 2'-O-methyl ribonucleotide
  modified_base 42: mod_base = OTHER; note = 2'-O-methyl ribonucleotide
  modified_base 46: mod_base = OTHER; note = 2'-O-methyl ribonucleotide
  modified_base 48: mod_base = OTHER; note = 2'-O-methyl ribonucleotide
  modified_base 50: mod_base = OTHER; note = 2'-O-methyl ribonucleotide
  modified_base 52: mod_base = OTHER; note = 2'-O-methyl ribonucleotide
  modified_base 53: mod_base = OTHER; note = 2'-O-methyl ribonucleotide
  modified_base 54: mod_base = OTHER; note = 2'-O-methyl ribonucleotide
  modified_base 55: mod_base = OTHER; note = 2'-O-methyl ribonucleotide
  modified_base 56: mod_base = OTHER; note = 2'-O-methyl ribonucleotide
  modified_base 57: mod_base = OTHER; note = 2'-O-methyl ribonucleotide
  modified_base 60: mod_base = OTHER; note = 2'-O-methyl ribonucleotide
  modified_base 61: mod_base = OTHER; note = 2'-O-methyl ribonucleotide
  modified_base 66: mod_base = OTHER; note = 2'-O-methyl ribonucleotide
  modified_base 67: mod_base = OTHER; note = 2'-O-methyl ribonucleotide
  modified_base 70: mod_base = OTHER; note = 2'-O-methyl ribonucleotide
  modified_base 71: mod_base = OTHER; note = 2'-O-methyl ribonucleotide
  modified_base 72: mod_base = OTHER; note = 2'-O-methyl ribonucleotide
  modified_base 74: mod_base = OTHER; note = 2'-O-methyl ribonucleotide
  modified_base 75: mod_base = OTHER; note = 2'-O-methyl ribonucleotide
  modified_base 76: mod_base = OTHER; note = 2'-O-methyl ribonucleotide
  modified_base 77: mod_base = OTHER; note = 2'-O-methyl ribonucleotide
  modified_base 78: mod_base = OTHER; note = 2'-O-methyl ribonucleotide
  modified_base 79: mod_base = OTHER; note = 2'-O-methyl ribonucleotide
  modified_base 80: mod_base = OTHER; note = 2'-O-methyl ribonucleotide
  modified_base 81: mod_base = OTHER; note = 2'-O-methyl ribonucleotide
  modified_base 83: mod_base = OTHER; note = 2'-O-methyl ribonucleotide
  modified_base 84: mod_base = OTHER; note = 2'-O-methyl ribonucleotide
  modified_base 85: mod_base = OTHER; note = 2'-O-methyl ribonucleotide
  modified_base 86: mod_base = OTHER; note = 2'-O-methyl ribonucleotide
  modified_base 87: mod_base = OTHER; note = 2'-O-methyl ribonucleotide
  modified_base 88: mod_base = OTHER; note = 2'-O-methyl ribonucleotide
  modified_base 89: mod_base = OTHER; note = 2'-O-methyl ribonucleotide
  modified_base 90: mod_base = OTHER; note = 2'-O-methyl ribonucleotide
  modified_base 91: mod_base = OTHER; note = 2'-O-methyl ribonucleotide
  modified_base 92: mod_base = OTHER; note = 2'-O-methyl ribonucleotide
  modified_base 93: mod_base = OTHER; note = 2'-O-methyl ribonucleotide
  modified_base 94: mod_base = OTHER; note = 2'-O-methyl ribonucleotide
  modified_base 95: mod_base = OTHER; note = 2'-O-methyl ribonucleotide
  modified_base 96: mod_base = OTHER; note = 2'-O-methyl ribonucleotide
  modified_base 97: mod_base = OTHER; note = 2'-O-methyl ribonucleotide
  modified_base 98: mod_base = OTHER; note = 2'-O-methyl ribonucleotide
  modified_base 99: mod_base = OTHER; note = 2'-O-methyl ribonucleotide
  modified_base 100: mod_base = OTHER; note = 2'-O-methyl ribonucleotide
  modified_base 101: mod_base = OTHER; note = uniform ribonucleotides (A, C, G, inosine or U), deoxynucleotides (A, G, C, inosine or T), ribonebularine, 2'-O-methylnebularine or deoxynebularine
  modified_base 102: mod_base = OTHER; note = uniform ribonucleotides (A, C, G, inosine or U), deoxynucleotides (A, G, C, inosine or T), ribonebularine, 2'-O-methylnebularine or deoxynebularine
  modified_base 103: mod_base = OTHER; note = uniform ribonucleotides (A, C, G, inosine or U), deoxynucleotides (A, G, C, inosine or T), ribonebularine, 2'-O-methylnebularine or deoxynebularine
  modified_base 1..3: mod_base = OTHER; note = phosphorothioate linkage
  modified_base 25..26: mod_base = OTHER; note = phosphorothioate linkage
  modified_base 64..65: mod_base = OTHER; note = phosphorothioate linkage
  modified_base 98..100: mod_base = OTHER; note = phosphorothioate linkage
  misc_feature 1..100: note = RNA
  misc_feature 101..103: note = Optionally DNA or RNA

SEQ ID NO: 3128 - DNA, 103 bp, synthetic construct; identical to SEQ ID NO: 1796
  source 1..103: mol_type = other DNA
  modified_base 1: mod_base = OTHER; note = 2'-O-methyl ribonucleotide
  modified_base 2: mod_base = OTHER; note = 2'-O-methyl ribonucleotide
  modified_base 3: mod_base = OTHER; note = 2'-O-methyl ribonucleotide
  modified_base 21: mod_base = OTHER; note = 2'-O-methyl ribonucleotide
  modified_base 28: mod_base = OTHER; note = 2'-O-methyl ribonucleotide
  modified_base 29: mod_base = OTHER; note = 2'-O-methyl ribonucleotide
  modified_base 30: mod_base = OTHER; note = 2'-O-methyl ribonucleotide
  modified_base 31: mod_base = OTHER; note = 2'-O-methyl ribonucleotide
  modified_base 32: mod_base = OTHER; note = 2'-O-methyl ribonucleotide
  modified_base 33: mod_base = OTHER; note = 2'-O-methyl ribonucleotide
  modified_base 34: mod_base = OTHER; note = 2'-O-methyl ribonucleotide
  modified_base 35: mod_base = OTHER; note = 2'-O-methyl ribonucleotide
  modified_base 36: mod_base = OTHER; note = 2'-O-methyl ribonucleotide
  modified_base 37: mod_base = OTHER; note = 2'-O-methyl ribonucleotide
  modified_base 38: mod_base = OTHER; note = 2'-O-methyl ribonucleotide
  modified_base 39: mod_base = OTHER; note = 2'-O-methyl ribonucleotide
  modified_base 40: mod_base = OTHER; note = 2'-O-methyl ribonucleotide
  modified_base 41: mod_base = OTHER; note = 2'-O-methyl ribonucleotide
  modified_base 42: mod_base = OTHER; note = 2'-O-methyl ribonucleotide
  modified_base 46: mod_base = OTHER; note = 2'-O-methyl ribonucleotide
  modified_base 48: mod_base = OTHER; note = 2'-O-methyl ribonucleotide
  modified_base 50: mod_base = OTHER; note = 2'-O-methyl ribonucleotide
  modified_base 52: mod_base = OTHER; note = 2'-O-methyl ribonucleotide
  modified_base 53: mod_base = OTHER; note = 2'-O-methyl ribonucleotide
  modified_base 54: mod_base = OTHER; note = 2'-O-methyl ribonucleotide
  modified_base 55: mod_base = OTHER; note = 2'-O-methyl ribonucleotide
  modified_base 56: mod_base = OTHER; note = 2'-O-methyl ribonucleotide
  modified_base 57: mod_base = OTHER; note = 2'-O-methyl ribonucleotide
  modified_base 60: mod_base = OTHER; note = 2'-O-methyl ribonucleotide
  modified_base 61: mod_base = OTHER; note = 2'-O-methyl ribonucleotide
  modified_base 66: mod_base = OTHER; note = 2'-O-methyl ribonucleotide
  modified_base 67: mod_base = OTHER; note = 2'-O-methyl ribonucleotide
  modified_base 70: mod_base = OTHER; note = 2'-O-methyl ribonucleotide
  modified_base 71: mod_base = OTHER; note = 2'-O-methyl ribonucleotide
  modified_base 72: mod_base = OTHER; note = 2'-O-methyl ribonucleotide
  modified_base 73: mod_base = OTHER; note = 2'-O-methyl ribonucleotide
  modified_base 74: mod_base = OTHER; note = 2'-O-methyl ribonucleotide
  modified_base 75: mod_base = OTHER; note = 2'-O-methyl ribonucleotide
  modified_base 76: mod_base = OTHER; note = 2'-O-methyl ribonucleotide
  modified_base 77: mod_base = OTHER; note = 2'-O-methyl ribonucleotide
  modified_base 78: mod_base = OTHER; note = 2'-O-methyl ribonucleotide
  modified_base 79: mod_base = OTHER; note = 2'-O-methyl ribonucleotide
  modified_base 80: mod_base = OTHER; note = 2'-O-methyl ribonucleotide
  modified_base 81: mod_base = OTHER; note = 2'-O-methyl ribonucleotide
  modified_base 83: mod_base = OTHER; note = 2'-O-methyl ribonucleotide
  modified_base 84: mod_base = OTHER; note = 2'-O-methyl ribonucleotide
  modified_base 85: mod_base = OTHER; note = 2'-O-methyl ribonucleotide
  modified_base 86: mod_base = OTHER; note = 2'-O-methyl ribonucleotide
  modified_base 87: mod_base = OTHER; note = 2'-O-methyl ribonucleotide
  modified_base 88: mod_base = OTHER; note = 2'-O-methyl ribonucleotide
  modified_base 89: mod_base = OTHER; note = 2'-O-methyl ribonucleotide
  modified_base 90: mod_base = OTHER; note = 2'-O-methyl ribonucleotide
  modified_base 91: mod_base = OTHER; note = 2'-O-methyl ribonucleotide
  modified_base 92: mod_base = OTHER; note = 2'-O-methyl ribonucleotide
  modified_base 93: mod_base = OTHER; note = 2'-O-methyl ribonucleotide
  modified_base 94: mod_base = OTHER; note = 2'-O-methyl ribonucleotide
  modified_base 95: mod_base = OTHER; note = 2'-O-methyl ribonucleotide
  modified_base 96: mod_base = OTHER; note = 2'-O-methyl ribonucleotide
  modified_base 97: mod_base = OTHER; note = 2'-O-methyl ribonucleotide
  modified_base 98: mod_base = OTHER; note = 2'-O-methyl ribonucleotide
  modified_base 99: mod_base = OTHER; note = 2'-O-methyl ribonucleotide
  modified_base 100: mod_base = OTHER; note = 2'-O-methyl ribonucleotide
  modified_base 101: mod_base = OTHER; note = uniform ribonucleotides (A, C, G, inosine or U), deoxynucleotides (A, G, C, inosine or T), ribonebularine, 2'-O-methylnebularine or deoxynebularine
  modified_base 102: mod_base = OTHER; note = uniform ribonucleotides (A, C, G, inosine or U), deoxynucleotides (A, G, C, inosine or T), ribonebularine, 2'-O-methylnebularine or deoxynebularine
  modified_base 103: mod_base = OTHER; note = uniform ribonucleotides (A, C, G, inosine or U), deoxynucleotides (A, G, C, inosine or T), ribonebularine, 2'-O-methylnebularine or deoxynebularine
  modified_base 1..3: mod_base = OTHER; note = phosphorothioate linkage
  modified_base 25..26: mod_base = OTHER; note = phosphorothioate linkage
  modified_base 64..65: mod_base = OTHER; note = phosphorothioate linkage
  modified_base 98..100: mod_base = OTHER; note = phosphorothioate linkage
  misc_feature 1..100: note = RNA
  misc_feature 101..103: note = Optionally DNA or RNA

SEQ ID NO: 3129 - DNA, 103 bp, synthetic construct; identical to SEQ ID NO: 1796
  source 1..103: mol_type = other DNA
  modified_base 1: mod_base = OTHER; note = 2'-O-methyl ribonucleotide
  modified_base 2: mod_base = OTHER; note = 2'-O-methyl ribonucleotide
  modified_base 3: mod_base = OTHER; note = 2'-O-methyl ribonucleotide
  modified_base 21: mod_base = OTHER; note = 2'-O-methyl ribonucleotide
  modified_base 28: mod_base = OTHER; note = 2'-O-methyl ribonucleotide
  modified_base 29: mod_base = OTHER; note = 2'-O-methyl ribonucleotide
  modified_base 30: mod_base = OTHER; note = 2'-O-methyl ribonucleotide
  modified_base 31: mod_base = OTHER; note = 2'-O-methyl ribonucleotide
  modified_base 32: mod_base = OTHER; note = 2'-O-methyl ribonucleotide
  modified_base 34: mod_base = OTHER; note = 2'-O-methyl ribonucleotide
  modified_base 35: mod_base = OTHER; note = 2'-O-methyl ribonucleotide
  modified_base 36: mod_base = OTHER; note = 2'-O-methyl ribonucleotide
  modified_base 37: mod_base = OTHER; note = 2'-O-methyl ribonucleotide
  modified_base 38: mod_base = OTHER; note = 2'-O-methyl ribonucleotide
  modified_base 39: mod_base = OTHER; note = 2'-O-methyl ribonucleotide
  modified_base 40: mod_base = OTHER; note = 2'-O-methyl ribonucleotide
  modified_base 41: mod_base = OTHER; note = 2'-O-methyl ribonucleotide
  modified_base 42: mod_base = OTHER; note = 2'-O-methyl ribonucleotide
  modified_base 46: mod_base = OTHER; note = 2'-O-methyl ribonucleotide
  modified_base 48: mod_base = OTHER; note = 2'-O-methyl ribonucleotide
  modified_base 50: mod_base = OTHER; note = 2'-O-methyl ribonucleotide
  modified_base 52: mod_base = OTHER; note = 2'-O-methyl ribonucleotide
  modified_base 53: mod_base = OTHER; note = 2'-O-methyl ribonucleotide
  modified_base 54: mod_base = OTHER; note = 2'-O-methyl ribonucleotide
  modified_base 55: mod_base = OTHER; note = 2'-O-methyl ribonucleotide
  modified_base 56: mod_base = OTHER; note = 2'-O-methyl ribonucleotide
  modified_base 57: mod_base = OTHER; note = 2'-O-methyl ribonucleotide
  modified_base 60: mod_base = OTHER; note = 2'-O-methyl ribonucleotide
  modified_base 61: mod_base = OTHER; note = 2'-O-methyl ribonucleotide
  modified_base 66: mod_base = OTHER; note = 2'-O-methyl ribonucleotide
  modified_base 67: mod_base = OTHER; note = 2'-O-methyl ribonucleotide
  modified_base 70: mod_base = OTHER; note = 2'-O-methyl ribonucleotide
  modified_base 71: mod_base = OTHER; note = 2'-O-methyl ribonucleotide
  modified_base 72: mod_base = OTHER; note = 2'-O-methyl ribonucleotide
  modified_base 74: mod_base = OTHER; note = 2'-O-methyl ribonucleotide
  modified_base 75: mod_base = OTHER; note = 2'-O-methyl ribonucleotide
  modified_base 76: mod_base = OTHER; note = 2'-O-methyl ribonucleotide
  modified_base 77: mod_base = OTHER; note = 2'-O-methyl ribonucleotide
  modified_base 78: mod_base = OTHER; note = 2'-O-methyl ribonucleotide
  modified_base 79: mod_base = OTHER; note = 2'-O-methyl ribonucleotide
  modified_base 80: mod_base = OTHER; note = 2'-O-methyl ribonucleotide
  modified_base 81: mod_base = OTHER; note = 2'-O-methyl ribonucleotide
  modified_base 83: mod_base = OTHER; note = 2'-O-methyl ribonucleotide
  modified_base 84: mod_base = OTHER; note = 2'-O-methyl ribonucleotide
  modified_base 85: mod_base = OTHER; note = 2'-O-methyl ribonucleotide
  modified_base 86: mod_base = OTHER; note = 2'-O-methyl ribonucleotide
  modified_base 87: mod_base = OTHER; note = 2'-O-methyl ribonucleotide
  modified_base 88: mod_base = OTHER; note = 2'-O-methyl ribonucleotide
  modified_base 89: mod_base = OTHER; note = 2'-O-methyl ribonucleotide
  modified_base 90: mod_base = OTHER; note = 2'-O-methyl ribonucleotide
  modified_base 91: mod_base = OTHER; note = 2'-O-methyl ribonucleotide
  modified_base 92: mod_base = OTHER; note = 2'-O-methyl ribonucleotide
  modified_base 93: mod_base = OTHER; note = 2'-O-methyl ribonucleotide
  modified_base 94: mod_base = OTHER; note = 2'-O-methyl ribonucleotide
  modified_base 95: mod_base = OTHER; note = 2'-O-methyl ribonucleotide
  modified_base 96: mod_base = OTHER; note = 2'-O-methyl ribonucleotide
  modified_base 97: mod_base = OTHER; note = 2'-O-methyl ribonucleotide
  modified_base 98: mod_base = OTHER; note = 2'-O-methyl ribonucleotide
  modified_base 99: mod_base = OTHER; note = 2'-O-methyl ribonucleotide
  modified_base 100: mod_base = OTHER; note = 2'-O-methyl ribonucleotide
  modified_base 101: mod_base = OTHER; note = uniform ribonucleotides (A, C, G, inosine or U), deoxynucleotides (A, G, C, inosine or T), ribonebularine, 2'-O-methylnebularine or deoxynebularine
  modified_base 102: mod_base = OTHER; note = uniform ribonucleotides (A, C, G, inosine or U), deoxynucleotides (A, G, C, inosine or T), ribonebularine, 2'-O-methylnebularine or deoxynebularine
  modified_base 103: mod_base = OTHER; note = uniform ribonucleotides (A, C, G, inosine or U), deoxynucleotides (A, G, C, inosine or T), ribonebularine, 2'-O-methylnebularine or deoxynebularine
  modified_base 1..3: mod_base = OTHER; note = phosphorothioate linkage
  modified_base 25..26: mod_base = OTHER; note = phosphorothioate linkage
  modified_base 64..65: mod_base = OTHER; note = phosphorothioate linkage
  modified_base 98..100: mod_base = OTHER; note = phosphorothioate linkage
  misc_feature 1..100: note = RNA
  misc_feature 101..103: note = Optionally DNA or RNA

SEQ ID NO: 3130 - DNA, 103 bp, synthetic construct; identical to SEQ ID NO: 1797
  source 1..103: mol_type = other DNA
  modified_base 1: mod_base = OTHER; note = 2'-O-methyl ribonucleotide
  modified_base 2: mod_base = OTHER; note = 2'-O-methyl ribonucleotide
  modified_base 3: mod_base = OTHER; note = 2'-O-methyl ribonucleotide
  modified_base 21: mod_base = OTHER; note = 2'-O-methyl ribonucleotide
  modified_base 28: mod_base = OTHER; note = 2'-O-methyl ribonucleotide
  modified_base 29: mod_base = OTHER; note = 2'-O-methyl ribonucleotide
  modified_base 30: mod_base = OTHER; note = 2'-O-methyl ribonucleotide
  modified_base 31: mod_base = OTHER; note = 2'-O-methyl ribonucleotide
  modified_base 32: mod_base = OTHER; note = 2'-O-methyl ribonucleotide
  modified_base 33: mod_base = OTHER; note = 2'-O-methyl ribonucleotide
  modified_base 34: mod_base = OTHER; note = 2'-O-methyl ribonucleotide
  modified_base 35: mod_base = OTHER; note = 2'-O-methyl ribonucleotide
  modified_base 36: mod_base = OTHER; note = 2'-O-methyl ribonucleotide
  modified_base 37: mod_base = OTHER; note = 2'-O-methyl ribonucleotide
  modified_base 38: mod_base = OTHER; note = 2'-O-methyl ribonucleotide
  modified_base 39: mod_base = OTHER; note = 2'-O-methyl ribonucleotide
  modified_base 40: mod_base = OTHER; note = 2'-O-methyl ribonucleotide
  modified_base 41: mod_base = OTHER; note = 2'-O-methyl ribonucleotide
  modified_base 42: mod_base = OTHER; note = 2'-O-methyl ribonucleotide
  modified_base 46: mod_base = OTHER; note = 2'-O-methyl ribonucleotide
  modified_base 48: mod_base = OTHER; note = 2'-O-methyl ribonucleotide
  modified_base 50: mod_base = OTHER; note = 2'-O-methyl ribonucleotide
  modified_base 52: mod_base = OTHER; note = 2'-O-methyl ribonucleotide
  modified_base 53: mod_base = OTHER; note = 2'-O-methyl ribonucleotide
  modified_base 54: mod_base = OTHER; note = 2'-O-methyl ribonucleotide
  modified_base 57: mod_base = OTHER; note = 2'-O-methyl ribonucleotide
  modified_base 61: mod_base = OTHER; note = 2'-O-methyl ribonucleotide
  modified_base 66: mod_base = OTHER; note = 2'-O-methyl ribonucleotide
  modified_base 67: mod_base = OTHER; note = 2'-O-methyl ribonucleotide
  modified_base 70: mod_base = OTHER; note = 2'-O-methyl ribonucleotide
  modified_base 71: mod_base = OTHER; note = 2'-O-methyl ribonucleotide
  modified_base 72: mod_base = OTHER; note = 2'-O-methyl ribonucleotide
  modified_base 74: mod_base = OTHER; note = 2'-O-methyl ribonucleotide
  modified_base 75: mod_base = OTHER; note = 2'-O-methyl ribonucleotide
  modified_base 76: mod_base = OTHER; note = 2'-O-methyl ribonucleotide
  modified_base 77: mod_base = OTHER; note = 2'-O-methyl ribonucleotide
  modified_base 78: mod_base = OTHER; note = 2'-O-methyl ribonucleotide
  modified_base 79: mod_base = OTHER; note = 2'-O-methyl ribonucleotide
  modified_base 80: mod_base = OTHER; note = 2'-O-methyl ribonucleotide
  modified_base 82: mod_base = OTHER; note = 2'-O-methyl ribonucleotide
  modified_base 83: mod_base = OTHER; note = 2'-O-methyl ribonucleotide
  modified_base 84: mod_base = OTHER; note = 2'-O-methyl ribonucleotide
  modified_base 85: mod_base = OTHER; note = 2'-O-methyl ribonucleotide
  modified_base 86: mod_base = OTHER; note = 2'-O-methyl ribonucleotide
  modified_base 87: mod_base = OTHER; note = 2'-O-methyl ribonucleotide
  modified_base 89: mod_base = OTHER; note = 2'-O-methyl ribonucleotide
  modified_base 92: mod_base = OTHER; note = 2'-O-methyl ribonucleotide
  modified_base 93: mod_base = OTHER; note = 2'-O-methyl ribonucleotide
  modified_base 94: mod_base = OTHER; note = 2'-O-methyl ribonucleotide
  modified_base 95: mod_base = OTHER; note = 2'-O-methyl ribonucleotide
  modified_base 96: mod_base = OTHER; note = 2'-O-methyl ribonucleotide
  modified_base 97: mod_base = OTHER; note = 2'-O-methyl ribonucleotide
  modified_base 98: mod_base = OTHER; note = 2'-O-methyl ribonucleotide
  modified_base 99: mod_base = OTHER; note = 2'-O-methyl ribonucleotide
  modified_base 100: mod_base = OTHER; note = 2'-O-methyl ribonucleotide
  modified_base 101: mod_base = OTHER; note = uniform ribonucleotides (A, C, G, inosine or U), deoxynucleotides (A, G, C, inosine or T), ribonebularine, 2'-O-methylnebularine or deoxynebularine
  modified_base 102: mod_base = OTHER; note = uniform ribonucleotides (A, C, G, inosine or U), deoxynucleotides (A, G, C, inosine or T), ribonebularine, 2'-O-methylnebularine or deoxynebularine
  modified_base 103: mod_base = OTHER; note = uniform ribonucleotides (A, C, G, inosine or U), deoxynucleotides (A, G, C, inosine or T), ribonebularine, 2'-O-methylnebularine or deoxynebularine
  modified_base 1..3: mod_base = OTHER; note = phosphorothioate linkage
  modified_base 25..26: mod_base = OTHER; note = phosphorothioate linkage
  modified_base 64..65: mod_base = OTHER; note = phosphorothioate linkage
  modified_base 98..100: mod_base = OTHER; note = phosphorothioate linkage
  misc_feature 1..100: note = RNA
  misc_feature 101..103: note = Optionally DNA or RNA

SEQ ID NO: 3131 - DNA, 103 bp, synthetic construct; identical to SEQ ID NO: 1797
  source 1..103: mol_type = other DNA
  modified_base 1: mod_base = OTHER; note = 2'-O-methyl ribonucleotide
  modified_base 2: mod_base = OTHER; note = 2'-O-methyl ribonucleotide
  modified_base 3: mod_base = OTHER; note = 2'-O-methyl ribonucleotide
  modified_base 21: mod_base = OTHER; note = 2'-O-methyl ribonucleotide
  modified_base 28: mod_base = OTHER; note = 2'-O-methyl ribonucleotide
  modified_base 29: mod_base = OTHER; note = 2'-O-methyl ribonucleotide
  modified_base 30: mod_base = OTHER; note = 2'-O-methyl ribonucleotide
  modified_base 31: mod_base = OTHER; note = 2'-O-methyl ribonucleotide
  modified_base 32: mod_base = OTHER; note = 2'-O-methyl ribonucleotide
  modified_base 33: mod_base = OTHER; note = 2'-O-methyl ribonucleotide
  modified_base 34: mod_base = OTHER; note = 2'-O-methyl ribonucleotide
  modified_base 35: mod_base = OTHER; note = 2'-O-methyl ribonucleotide
  modified_base 36: mod_base = OTHER; note = 2'-O-methyl ribonucleotide
  modified_base 37: mod_base = OTHER; note = 2'-O-methyl ribonucleotide
  modified_base 38: mod_base = OTHER; note = 2'-O-methyl ribonucleotide
  modified_base 39: mod_base = OTHER; note = 2'-O-methyl ribonucleotide
  modified_base 40: mod_base = OTHER; note = 2'-O-methyl ribonucleotide
  modified_base 41: mod_base = OTHER; note = 2'-O-methyl ribonucleotide
  modified_base 42: mod_base = OTHER; note = 2'-O-methyl ribonucleotide
  modified_base 46: mod_base = OTHER; note = 2'-O-methyl ribonucleotide
  modified_base 48: mod_base = OTHER; note = 2'-O-methyl ribonucleotide
  modified_base 50: mod_base = OTHER; note = 2'-O-methyl ribonucleotide
  modified_base 52: mod_base = OTHER; note = 2'-O-methyl ribonucleotide
  modified_base 53: mod_base = OTHER; note = 2'-O-methyl ribonucleotide
  modified_base 54: mod_base = OTHER; note = 2'-O-methyl ribonucleotide
  modified_base 55: mod_base = OTHER; note = 2'-O-methyl ribonucleotide
  modified_base 56: mod_base = OTHER; note = 2'-O-methyl ribonucleotide
  modified_base 57: mod_base = OTHER; note = 2'-O-methyl ribonucleotide
  modified_base 60: mod_base = OTHER; note = 2'-O-methyl ribonucleotide
  modified_base 61: mod_base = OTHER; note = 2'-O-methyl ribonucleotide
  modified_base 66: mod_base = OTHER; note = 2'-O-methyl ribonucleotide
  modified_base 67: mod_base = OTHER; note = 2'-O-methyl ribonucleotide
  modified_base 70: mod_base = OTHER; note = 2'-O-methyl ribonucleotide
  modified_base 71: mod_base = OTHER; note = 2'-O-methyl ribonucleotide
  modified_base 72: mod_base = OTHER; note = 2'-O-methyl ribonucleotide
  modified_base 74: mod_base = OTHER; note = 2'-O-methyl ribonucleotide
  modified_base 75: mod_base = OTHER; note = 2'-O-methyl ribonucleotide
  modified_base 76: mod_base = OTHER; note = 2'-O-methyl ribonucleotide
  modified_base 77: mod_base = OTHER; note = 2'-O-methyl ribonucleotide
  modified_base 78: mod_base = OTHER; note = 2'-O-methyl ribonucleotide
  modified_base 79: mod_base = OTHER; note = 2'-O-methyl ribonucleotide
  modified_base 80: mod_base = OTHER; note = 2'-O-methyl ribonucleotide
  modified_base 82: mod_base = OTHER; note = 2'-O-methyl ribonucleotide
  modified_base 83: mod_base = OTHER; note = 2'-O-methyl ribonucleotide
  modified_base 84: mod_base = OTHER; note = 2'-O-methyl ribonucleotide
  modified_base 85: mod_base = OTHER; note = 2'-O-methyl ribonucleotide
  modified_base 86: mod_base = OTHER; note = 2'-O-methyl ribonucleotide
  modified_base 87: mod_base = OTHER; note = 2'-O-methyl ribonucleotide
  modified_base 89: mod_base = OTHER; note = 2'-O-methyl ribonucleotide
  modified_base 92: mod_base = OTHER; note = 2'-O-methyl ribonucleotide
  modified_base 93: mod_base = OTHER; note = 2'-O-methyl ribonucleotide
  modified_base 94: mod_base = OTHER; note = 2'-O-methyl ribonucleotide
  modified_base 95: mod_base = OTHER; note = 2'-O-methyl ribonucleotide
  modified_base 96: mod_base = OTHER; note = 2'-O-methyl ribonucleotide
  modified_base 97: mod_base = OTHER; note = 2'-O-methyl ribonucleotide
  modified_base 98: mod_base = OTHER; note = 2'-O-methyl ribonucleotide
  modified_base 99: mod_base = OTHER; note = 2'-O-methyl ribonucleotide
  modified_base 100: mod_base = OTHER; note = 2'-O-methyl ribonucleotide
  modified_base 101: mod_base = OTHER; note = uniform ribonucleotides (A, C, G, inosine or U), deoxynucleotides (A, G, C, inosine or T), ribonebularine, 2'-O-methylnebularine or deoxynebularine
  modified_base 102: mod_base = OTHER; note = uniform ribonucleotides (A, C, G, inosine or U), deoxynucleotides (A, G, C, inosine or T), ribonebularine, 2'-O-methylnebularine or deoxynebularine
  modified_base 103: mod_base = OTHER; note = uniform ribonucleotides (A, C, G, inosine or U), deoxynucleotides (A, G, C, inosine or T), ribonebularine, 2'-O-methylnebularine or deoxynebularine
  modified_base 1..3: mod_base = OTHER; note = phosphorothioate linkage
  modified_base 25..26: mod_base = OTHER; note = phosphorothioate linkage
  modified_base 64..65: mod_base = OTHER; note = phosphorothioate linkage
  modified_base 98..100: mod_base = OTHER; note = phosphorothioate linkage
  misc_feature 1..100: note = RNA
  misc_feature 101..103: note = Optionally DNA or RNA

SEQ ID NO: 3132 - DNA, 103 bp, synthetic construct; identical to SEQ ID NO: 1797
  source 1..103: mol_type = other DNA
  modified_base 1: mod_base = OTHER; note = 2'-O-methyl ribonucleotide
  modified_base 2: mod_base = OTHER; note = 2'-O-methyl ribonucleotide
  modified_base 3: mod_base = OTHER; note = 2'-O-methyl ribonucleotide
  modified_base 21: mod_base = OTHER; note = 2'-O-methyl ribonucleotide
  modified_base 28: mod_base = OTHER; note = 2'-O-methyl ribonucleotide
  modified_base 29: mod_base = OTHER; note = 2'-O-methyl ribonucleotide
  modified_base 30: mod_base = OTHER; note = 2'-O-methyl ribonucleotide
  modified_base 31: mod_base = OTHER; note = 2'-O-methyl ribonucleotide
  modified_base 32: mod_base = OTHER; note = 2'-O-methyl ribonucleotide
  modified_base 33: mod_base = OTHER; note = 2'-O-methyl ribonucleotide
  modified_base 34: mod_base = OTHER; note = 2'-O-methyl ribonucleotide
  modified_base 35: mod_base = OTHER; note = 2'-O-methyl ribonucleotide
  modified_base 36: mod_base = OTHER; note = 2'-O-methyl ribonucleotide
  modified_base 37: mod_base = OTHER; note = 2'-O-methyl ribonucleotide
  modified_base 38: mod_base = OTHER; note = 2'-O-methyl ribonucleotide
  modified_base 39: mod_base = OTHER; note = 2'-O-methyl ribonucleotide
  modified_base 40: mod_base = OTHER; note = 2'-O-methyl ribonucleotide
  modified_base 41: mod_base = OTHER; note = 2'-O-methyl ribonucleotide
  modified_base 42: mod_base = OTHER; note = 2'-O-methyl ribonucleotide
  modified_base 46: mod_base = OTHER; note = 2'-O-methyl ribonucleotide
  modified_base 48: mod_base = OTHER; note = 2'-O-methyl ribonucleotide
  modified_base 50: mod_base = OTHER; note = 2'-O-methyl ribonucleotide
  modified_base 52: mod_base = OTHER; note = 2'-O-methyl ribonucleotide
  modified_base 53: mod_base = OTHER; note = 2'-O-methyl ribonucleotide
  modified_base 54: mod_base = OTHER; note = 2'-O-methyl ribonucleotide
  modified_base 57: mod_base = OTHER; note = 2'-O-methyl ribonucleotide
  modified_base 61: mod_base = OTHER; note = 2'-O-methyl ribonucleotide
  modified_base 66: mod_base = OTHER; note = 2'-O-methyl ribonucleotide
  modified_base 67: mod_base = OTHER; note = 2'-O-methyl ribonucleotide
  modified_base 70: mod_base = OTHER; note = 2'-O-methyl ribonucleotide
  modified_base 71: mod_base = OTHER; note = 2'-O-methyl ribonucleotide
  modified_base 72: mod_base = OTHER; note = 2'-O-methyl ribonucleotide
  modified_base 73: mod_base = OTHER; note = 2'-O-methyl ribonucleotide
  modified_base 74: mod_base = OTHER; note = 2'-O-methyl ribonucleotide
  modified_base 75: mod_base = OTHER; note = 2'-O-methyl ribonucleotide
  modified_base 76: mod_base = OTHER; note = 2'-O-methyl ribonucleotide
  modified_base 77: mod_base = OTHER; note = 2'-O-methyl ribonucleotide
  modified_base 78: mod_base = OTHER; note = 2'-O-methyl ribonucleotide
  modified_base 79: mod_base = OTHER; note = 2'-O-methyl ribonucleotide
  modified_base 80: mod_base = OTHER; note = 2'-O-methyl ribonucleotide
  modified_base 82: mod_base = OTHER; note = 2'-O-methyl ribonucleotide
  modified_base 83: mod_base = OTHER; note = 2'-O-methyl ribonucleotide
  modified_base 84: mod_base = OTHER; note = 2'-O-methyl ribonucleotide
  modified_base 85: mod_base = OTHER; note = 2'-O-methyl ribonucleotide
  modified_base 86: mod_base = OTHER; note = 2'-O-methyl ribonucleotide
  modified_base 87: mod_base = OTHER; note = 2'-O-methyl ribonucleotide
  modified_base 89: mod_base = OTHER; note = 2'-O-methyl ribonucleotide
  modified_base 92: mod_base = OTHER; note = 2'-O-methyl ribonucleotide
  modified_base 93: mod_base = OTHER; note = 2'-O-methyl ribonucleotide
  modified_base 94: mod_base = OTHER; note = 2'-O-methyl ribonucleotide
  modified_base 95: mod_base = OTHER; note = 2'-O-methyl ribonucleotide
  modified_base 96: mod_base = OTHER; note = 2'-O-methyl ribonucleotide
  modified_base 97: mod_base = OTHER; note = 2'-O-methyl ribonucleotide
  modified_base 98: mod_base = OTHER; note = 2'-O-methyl ribonucleotide
  modified_base 99: mod_base = OTHER; note = 2'-O-methyl ribonucleotide
  modified_base 100: mod_base = OTHER; note = 2'-O-methyl ribonucleotide
  modified_base 101: mod_base = OTHER; note = uniform ribonucleotides (A, C, G, inosine or U), deoxynucleotides (A, G, C, inosine or T), ribonebularine, 2'-O-methylnebularine or deoxynebularine
  modified_base 102: mod_base = OTHER; note = uniform ribonucleotides (A, C, G, inosine or U), deoxynucleotides (A, G, C, inosine or T), ribonebularine, 2'-O-methylnebularine or deoxynebularine
  modified_base 103: mod_base = OTHER; note = uniform ribonucleotides (A, C, G, inosine or U), deoxynucleotides (A, G, C, inosine or T), ribonebularine, 2'-O-methylnebularine or deoxynebularine
  modified_base 1..3: mod_base = OTHER; note = phosphorothioate linkage
  modified_base 25..26: mod_base = OTHER; note = phosphorothioate linkage
  modified_base 64..65: mod_base = OTHER; note = phosphorothioate linkage
  modified_base 98..100: mod_base = OTHER; note = phosphorothioate linkage
  misc_feature 1..100: note = RNA
  misc_feature 101..103: note = Optionally DNA or RNA

SEQ ID NO: 3133 - DNA, 103 bp, synthetic construct; identical to SEQ ID NO: 1797
  source 1..103: mol_type = other DNA
  modified_base 1: mod_base = OTHER; note = 2'-O-methyl ribonucleotide
  modified_base 2: mod_base = OTHER; note = 2'-O-methyl ribonucleotide
  modified_base 3: mod_base = OTHER; note = 2'-O-methyl ribonucleotide
  modified_base 21: mod_base = OTHER; note = 2'-O-methyl ribonucleotide
  modified_base 28: mod_base = OTHER; note = 2'-O-methyl ribonucleotide
  modified_base 29: mod_base = OTHER; note = 2'-O-methyl ribonucleotide
  modified_base 30: mod_base = OTHER; note = 2'-O-methyl ribonucleotide
  modified_base 31: mod_base = OTHER; note = 2'-O-methyl ribonucleotide
  modified_base 32: mod_base = OTHER; note = 2'-O-methyl ribonucleotide
  modified_base 33: mod_base = OTHER; note = 2'-O-methyl ribonucleotide
  modified_base 34: mod_base = OTHER; note = 2'-O-methyl ribonucleotide
  modified_base 35: mod_base = OTHER; note = 2'-O-methyl ribonucleotide
  modified_base 36: mod_base = OTHER; note = 2'-O-methyl ribonucleotide
  modified_base 37: mod_base = OTHER; note = 2'-O-methyl ribonucleotide
  modified_base 38: mod_base = OTHER; note = 2'-O-methyl ribonucleotide
  modified_base 39: mod_base = OTHER; note = 2'-O-methyl ribonucleotide
  modified_base 40: mod_base = OTHER; note = 2'-O-methyl ribonucleotide
  modified_base 41: mod_base = OTHER; note = 2'-O-methyl ribonucleotide
  modified_base 42: mod_base = OTHER; note = 2'-O-methyl ribonucleotide
  modified_base 46: mod_base = OTHER; note = 2'-O-methyl ribonucleotide
  modified_base 48: mod_base = OTHER; note = 2'-O-methyl ribonucleotide
  modified_base 50: mod_base = OTHER; note = 2'-O-methyl ribonucleotide
  modified_base 52: mod_base = OTHER; note = 2'-O-methyl ribonucleotide
  modified_base 53: mod_base = OTHER; note = 2'-O-methyl ribonucleotide
  modified_base 54: mod_base = OTHER; note = 2'-O-methyl ribonucleotide
  modified_base 57: mod_base = OTHER; note = 2'-O-methyl ribonucleotide
  modified_base 61: mod_base = OTHER; note = 2'-O-methyl ribonucleotide
  modified_base 66: mod_base = OTHER; note = 2'-O-methyl ribonucleotide
  modified_base 67: mod_base = OTHER; note = 2'-O-methyl ribonucleotide
  modified_base 70: mod_base = OTHER; note = 2'-O-methyl ribonucleotide
  modified_base 71: mod_base = OTHER; note = 2'-O-methyl ribonucleotide
  modified_base 72: mod_base = OTHER; note = 2'-O-methyl ribonucleotide
  modified_base 73: mod_base = OTHER; note = 2'-O-methyl ribonucleotide
  modified_base 74: mod_base = OTHER; note = 2'-O-methyl ribonucleotide
  modified_base 75: mod_base = OTHER; note = 2'-O-methyl ribonucleotide
  modified_base 76: mod_base = OTHER; note = 2'-O-methyl ribonucleotide
  modified_base 77: mod_base = OTHER; note = 2'-O-methyl ribonucleotide
  modified_base 78: mod_base = OTHER; note = 2'-O-methyl ribonucleotide
  modified_base 79: mod_base = OTHER; note = 2'-O-methyl ribonucleotide
  modified_base 80: mod_base = OTHER; note = 2'-O-methyl ribonucleotide
  modified_base 82: mod_base = OTHER; note = 2'-O-methyl ribonucleotide
  modified_base 83: mod_base = OTHER; note = 2'-O-methyl ribonucleotide
  modified_base 84: mod_base = OTHER; note = 2'-O-methyl ribonucleotide
  modified_base 85: mod_base = OTHER; note = 2'-O-methyl ribonucleotide
  modified_base 86: mod_base = OTHER; note = 2'-O-methyl ribonucleotide
  modified_base 87: mod_base = OTHER; note = 2'-O-methyl ribonucleotide
  modified_base 89: mod_base = OTHER; note = 2'-O-methyl ribonucleotide
  modified_base 91: mod_base = OTHER; note = 2'-O-methyl ribonucleotide
  modified_base 92: mod_base = OTHER; note = 2'-O-methyl ribonucleotide
  modified_base 93: mod_base = OTHER; note = 2'-O-methyl ribonucleotide
  modified_base 94: mod_base = OTHER; note = 2'-O-methyl ribonucleotide
  modified_base 95: mod_base = OTHER; note = 2'-O-methyl ribonucleotide
  modified_base 96: mod_base = OTHER; note = 2'-O-methyl ribonucleotide
  modified_base 97: mod_base = OTHER; note = 2'-O-methyl ribonucleotide
  modified_base 98: mod_base = OTHER; note = 2'-O-methyl ribonucleotide
  modified_base 99: mod_base = OTHER; note = 2'-O-methyl ribonucleotide
  modified_base 100: mod_base = OTHER; note = 2'-O-methyl ribonucleotide
  modified_base 101: mod_base = OTHER; note = uniform ribonucleotides (A, C, G, inosine or U), deoxynucleotides (A, G, C, inosine or T), ribonebularine, 2'-O-methylnebularine or deoxynebularine
  modified_base 102: mod_base = OTHER; note = uniform ribonucleotides (A, C, G, inosine or U), deoxynucleotides (A, G, C, inosine or T), ribonebularine, 2'-O-methylnebularine or deoxynebularine
  modified_base 103: mod_base = OTHER; note = uniform ribonucleotides (A, C, G, inosine or U), deoxynucleotides (A, G, C, inosine or T), ribonebularine, 2'-O-methylnebularine or deoxynebularine
  modified_base 1..3: mod_base = OTHER; note = phosphorothioate linkage
  modified_base 25..26: mod_base = OTHER; note = phosphorothioate linkage
  modified_base 64..65: mod_base = OTHER; note = phosphorothioate linkage
  modified_base 98..100: mod_base = OTHER; note = phosphorothioate linkage
  misc_feature 1..100: note = RNA
  misc_feature 101..103: note = Optionally DNA or RNA

SEQ ID NO: 3134 - DNA, 103 bp, synthetic construct; identical to SEQ ID NO: 1797
  source 1..103: mol_type = other DNA
  modified_base 1: mod_base = OTHER; note = 2'-O-methyl ribonucleotide
  modified_base 2: mod_base = OTHER; note = 2'-O-methyl ribonucleotide
  modified_base 3: mod_base = OTHER; note = 2'-O-methyl ribonucleotide
  modified_base 21: mod_base = OTHER; note = 2'-O-methyl ribonucleotide
  modified_base 28: mod_base = OTHER; note = 2'-O-methyl ribonucleotide
  modified_base 29: mod_base = OTHER; note = 2'-O-methyl ribonucleotide
  modified_base 30: mod_base = OTHER; note = 2'-O-methyl ribonucleotide
  modified_base 31: mod_base = OTHER; note = 2'-O-methyl ribonucleotide
  modified_base 32: mod_base = OTHER; note = 2'-O-methyl ribonucleotide
  modified_base 34: mod_base = OTHER; note = 2'-O-methyl ribonucleotide
  modified_base 35: mod_base = OTHER; note = 2'-O-methyl ribonucleotide
  modified_base 36: mod_base = OTHER; note = 2'-O-methyl ribonucleotide
  modified_base 37: mod_base = OTHER; note = 2'-O-methyl ribonucleotide
  modified_base 38: mod_base = OTHER; note = 2'-O-methyl ribonucleotide
  modified_base 39: mod_base = OTHER; note = 2'-O-methyl ribonucleotide
  modified_base 40: mod_base = OTHER; note = 2'-O-methyl ribonucleotide
  modified_base 41: mod_base = OTHER; note = 2'-O-methyl ribonucleotide
  modified_base 42: mod_base = OTHER; note = 2'-O-methyl ribonucleotide
  modified_base 46: mod_base = OTHER; note = 2'-O-methyl ribonucleotide
  modified_base 48: mod_base = OTHER; note = 2'-O-methyl ribonucleotide
  modified_base 50: mod_base = OTHER; note = 2'-O-methyl ribonucleotide
  modified_base 52: mod_base = OTHER; note = 2'-O-methyl ribonucleotide
  modified_base 53: mod_base = OTHER; note = 2'-O-methyl ribonucleotide
  modified_base 54: mod_base = OTHER; note = 2'-O-methyl ribonucleotide
  modified_base 57: mod_base = OTHER; note = 2'-O-methyl ribonucleotide
  modified_base 61: mod_base = OTHER; note = 2'-O-methyl ribonucleotide
  modified_base 66: mod_base = OTHER; note = 2'-O-methyl ribonucleotide
  modified_base 67: mod_base = OTHER; note = 2'-O-methyl ribonucleotide
  modified_base 70: mod_base = OTHER; note = 2'-O-methyl ribonucleotide
  modified_base 71: mod_base = OTHER; note = 2'-O-methyl ribonucleotide
  modified_base 72: mod_base = OTHER; note = 2'-O-methyl ribonucleotide
  modified_base 73: mod_base = OTHER; note = 2'-O-methyl ribonucleotide
  modified_base 74: mod_base = OTHER; note = 2'-O-methyl ribonucleotide
  modified_base 75: mod_base = OTHER; note = 2'-O-methyl ribonucleotide
  modified_base 76: mod_base = OTHER; note = 2'-O-methyl ribonucleotide
  modified_base 77: mod_base = OTHER; note = 2'-O-methyl ribonucleotide
  modified_base 78: mod_base = OTHER; note = 2'-O-methyl ribonucleotide
  modified_base 79: mod_base = OTHER; note = 2'-O-methyl ribonucleotide
  modified_base 80: mod_base = OTHER; note = 2'-O-methyl ribonucleotide
  modified_base 82: mod_base = OTHER; note = 2'-O-methyl ribonucleotide
  modified_base 83: mod_base = OTHER; note = 2'-O-methyl ribonucleotide
  modified_base 84: mod_base = OTHER; note = 2'-O-methyl ribonucleotide
  modified_base 85: mod_base = OTHER; note = 2'-O-methyl ribonucleotide
  modified_base 86: mod_base = OTHER; note = 2'-O-methyl ribonucleotide
  modified_base 87: mod_base = OTHER; note = 2'-O-methyl ribonucleotide
  modified_base 89: mod_base = OTHER; note = 2'-O-methyl ribonucleotide
  modified_base 92: mod_base = OTHER; note = 2'-O-methyl ribonucleotide
  modified_base 93: mod_base = OTHER; note = 2'-O-methyl ribonucleotide
  modified_base 94: mod_base = OTHER; note = 2'-O-methyl ribonucleotide
  modified_base 95: mod_base = OTHER; note = 2'-O-methyl ribonucleotide
  modified_base 96: mod_base = OTHER; note = 2'-O-methyl ribonucleotide
  modified_base 97: mod_base = OTHER; note = 2'-O-methyl ribonucleotide
  modified_base 98: mod_base = OTHER; note = 2'-O-methyl ribonucleotide
  modified_base 99: mod_base = OTHER; note = 2'-O-methyl ribonucleotide
  modified_base 100: mod_base = OTHER; note = 2'-O-methyl ribonucleotide
  modified_base 101: mod_base = OTHER; note = uniform ribonucleotides (A, C, G, inosine or U), deoxynucleotides (A, G, C, inosine or T), ribonebularine, 2'-O-methylnebularine or deoxynebularine
  modified_base 102: mod_base = OTHER; note = uniform ribonucleotides (A, C, G, inosine or U), deoxynucleotides (A, G, C, inosine or T), ribonebularine, 2'-O-methylnebularine or deoxynebularine
  modified_base 103: mod_base = OTHER; note = uniform ribonucleotides (A, C, G, inosine or U), deoxynucleotides (A, G, C, inosine or T), ribonebularine, 2'-O-methylnebularine or deoxynebularine
  modified_base 1..3: mod_base = OTHER; note = phosphorothioate linkage
  modified_base 25..26: mod_base = OTHER; note = phosphorothioate linkage
  modified_base 64..65: mod_base = OTHER; note = phosphorothioate linkage
  modified_base 98..100: mod_base = OTHER; note = phosphorothioate linkage
  misc_feature 1..100: note = RNA
  misc_feature 101..103: note = Optionally DNA or RNA

SEQ ID NO: 3135 - DNA, 103 bp, synthetic construct; identical to SEQ ID NO: 1797
  source 1..103: mol_type = other DNA
  modified_base 1: mod_base = OTHER; note = 2'-O-methyl ribonucleotide
  modified_base 2: mod_base = OTHER; note = 2'-O-methyl ribonucleotide
  modified_base 3: mod_base = OTHER; note = 2'-O-methyl ribonucleotide
  modified_base 21: mod_base = OTHER; note = 2'-O-methyl ribonucleotide
  modified_base 28: mod_base = OTHER; note = 2'-O-methyl ribonucleotide
  modified_base 29: mod_base = OTHER; note = 2'-O-methyl ribonucleotide
  modified_base 30: mod_base = OTHER; note = 2'-O-methyl ribonucleotide
  modified_base 31: mod_base = OTHER; note = 2'-O-methyl ribonucleotide
  modified_base 32: mod_base = OTHER; note = 2'-O-methyl ribonucleotide
  modified_base 34: mod_base = OTHER; note = 2'-O-methyl ribonucleotide
  modified_base 35: mod_base = OTHER; note = 2'-O-methyl ribonucleotide
  modified_base 36: mod_base = OTHER; note = 2'-O-methyl ribonucleotide
  modified_base 37: mod_base = OTHER; note = 2'-O-methyl ribonucleotide
  modified_base 38: mod_base = OTHER; note = 2'-O-methyl ribonucleotide
  modified_base 39: mod_base = OTHER; note = 2'-O-methyl ribonucleotide
  modified_base 40: mod_base = OTHER; note = 2'-O-methyl ribonucleotide
  modified_base 41: mod_base = OTHER; note = 2'-O-methyl ribonucleotide
  modified_base 42: mod_base = OTHER; note = 2'-O-methyl ribonucleotide
  modified_base 46: mod_base = OTHER; note = 2'-O-methyl ribonucleotide
  modified_base 48: mod_base = OTHER; note = 2'-O-methyl ribonucleotide
  modified_base 50: mod_base = OTHER; note = 2'-O-methyl ribonucleotide
  modified_base 52: mod_base = OTHER; note = 2'-O-methyl ribonucleotide
  modified_base 53: mod_base = OTHER; note = 2'-O-methyl ribonucleotide
  modified_base 54: mod_base = OTHER; note = 2'-O-methyl ribonucleotide
  modified_base 57: mod_base = OTHER; note = 2'-O-methyl ribonucleotide
  modified_base 61: mod_base = OTHER; note = 2'-O-methyl ribonucleotide
  modified_base 66: mod_base = OTHER; note = 2'-O-methyl ribonucleotide
  modified_base 67: mod_base = OTHER; note = 2'-O-methyl ribonucleotide
  modified_base 70: mod_base = OTHER; note = 2'-O-methyl ribonucleotide
  modified_base 71: mod_base = OTHER; note = 2'-O-methyl ribonucleotide
  modified_base 72: mod_base = OTHER; note = 2'-O-methyl ribonucleotide
  modified_base 73: mod_base = OTHER; note = 2'-O-methyl ribonucleotide
  modified_base 74: mod_base = OTHER; note = 2'-O-methyl ribonucleotide
  modified_base 75: mod_base = OTHER; note = 2'-O-methyl ribonucleotide
  modified_base 76: mod_base = OTHER; note = 2'-O-methyl ribonucleotide
  modified_base 77: mod_base = OTHER; note = 2'-O-methyl ribonucleotide
  modified_base 78: mod_base = OTHER; note = 2'-O-methyl ribonucleotide
  modified_base 79: mod_base = OTHER; note = 2'-O-methyl ribonucleotide
  modified_base 80: mod_base = OTHER; note = 2'-O-methyl ribonucleotide
  modified_base 82: mod_base = OTHER; note = 2'-O-methyl ribonucleotide
  modified_base 83: mod_base = OTHER; note = 2'-O-methyl ribonucleotide
  modified_base 84: mod_base = OTHER; note = 2'-O-methyl ribonucleotide
  modified_base 85: mod_base = OTHER; note = 2'-O-methyl ribonucleotide
  modified_base 86: mod_base = OTHER; note = 2'-O-methyl ribonucleotide
  modified_base 87: mod_base = OTHER; note = 2'-O-methyl ribonucleotide
  modified_base 89: mod_base = OTHER; note = 2'-O-methyl ribonucleotide
  modified_base 91: mod_base = OTHER; note = 2'-O-methyl ribonucleotide
  modified_base 92: mod_base = OTHER; note = 2'-O-methyl ribonucleotide
  modified_base 93: mod_base = OTHER; note = 2'-O-methyl ribonucleotide
  modified_base 94: mod_base = OTHER; note = 2'-O-methyl ribonucleotide
  modified_base 95: mod_base = OTHER; note = 2'-O-methyl ribonucleotide
  modified_base 96: mod_base = OTHER; note = 2'-O-methyl ribonucleotide
  modified_base 97: mod_base = OTHER; note = 2'-O-methyl ribonucleotide
  modified_base 98: mod_base = OTHER; note = 2'-O-methyl ribonucleotide
  modified_base 99: mod_base = OTHER; note = 2'-O-methyl ribonucleotide
  modified_base 100: mod_base = OTHER; note = 2'-O-methyl ribonucleotide
  modified_base 101: mod_base = OTHER; note = uniform ribonucleotides (A, C, G, inosine or U), deoxynucleotides (A, G, C, inosine or T), ribonebularine, 2'-O-methylnebularine or deoxynebularine
  modified_base 102: mod_base = OTHER; note = uniform ribonucleotides (A, C, G, inosine or U), deoxynucleotides (A, G, C, inosine or T), ribonebularine, 2'-O-methylnebularine or deoxynebularine
  modified_base 103: mod_base = OTHER; note = uniform ribonucleotides (A, C, G, inosine or U), deoxynucleotides (A, G, C, inosine or T), ribonebularine, 2'-O-methylnebularine or deoxynebularine
  modified_base 1..3: mod_base = OTHER; note = phosphorothioate linkage
  modified_base 25..26: mod_base = OTHER; note = phosphorothioate linkage
  modified_base 64..65: mod_base = OTHER; note = phosphorothioate linkage
  modified_base 98..100: mod_base = OTHER; note = phosphorothioate linkage
  misc_feature 1..100: note = RNA
  misc_feature 101..103: note = Optionally DNA or RNA

SEQ ID NO: 3136 - DNA, 103 bp, synthetic construct; identical to SEQ ID NO: 1797
  source 1..103: mol_type = other DNA
  modified_base 1: mod_base = OTHER; note = 2'-O-methyl ribonucleotide
  modified_base 2: mod_base = OTHER; note = 2'-O-methyl ribonucleotide
  modified_base 3: mod_base = OTHER; note = 2'-O-methyl ribonucleotide
  modified_base 21: mod_base = OTHER; note = 2'-O-methyl ribonucleotide
  modified_base 28: mod_base = OTHER; note = 2'-O-methyl ribonucleotide
  modified_base 29: mod_base = OTHER; note = 2'-O-methyl ribonucleotide
  modified_base 30: mod_base = OTHER; note = 2'-O-methyl ribonucleotide
  modified_base 31: mod_base = OTHER; note = 2'-O-methyl ribonucleotide
  modified_base 32: mod_base = OTHER; note = 2'-O-methyl ribonucleotide
  modified_base 34: mod_base = OTHER; note = 2'-O-methyl ribonucleotide
  modified_base 35: mod_base = OTHER; note = 2'-O-methyl ribonucleotide
  modified_base 36: mod_base = OTHER; note = 2'-O-methyl ribonucleotide
  modified_base 37: mod_base = OTHER; note = 2'-O-methyl ribonucleotide
  modified_base 38: mod_base = OTHER; note = 2'-O-methyl ribonucleotide
  modified_base 39: mod_base = OTHER; note = 2'-O-methyl ribonucleotide
  modified_base 40: mod_base = OTHER; note = 2'-O-methyl ribonucleotide
  modified_base 41: mod_base = OTHER; note = 2'-O-methyl ribonucleotide
  modified_base 42: mod_base = OTHER; note = 2'-O-methyl ribonucleotide
  modified_base 46: mod_base = OTHER; note = 2'-O-methyl ribonucleotide
  modified_base 48: mod_base = OTHER; note = 2'-O-methyl ribonucleotide
  modified_base 50: mod_base = OTHER; note = 2'-O-methyl ribonucleotide
  modified_base 52: mod_base = OTHER; note = 2'-O-methyl ribonucleotide
  modified_base 53: mod_base = OTHER; note = 2'-O-methyl ribonucleotide
  modified_base 54: mod_base = OTHER; note = 2'-O-methyl ribonucleotide
  modified_base 55: mod_base = OTHER; note = 2'-O-methyl ribonucleotide
  modified_base 56: mod_base = OTHER; note = 2'-O-methyl ribonucleotide
  modified_base 57: mod_base = OTHER; note = 2'-O-methyl ribonucleotide
  modified_base 60: mod_base = OTHER; note = 2'-O-methyl ribonucleotide
  modified_base 61: mod_base = OTHER; note = 2'-O-methyl ribonucleotide
  modified_base 66: mod_base = OTHER; note = 2'-O-methyl ribonucleotide
  modified_base 67: mod_base = OTHER; note = 2'-O-methyl ribonucleotide
  modified_base 70: mod_base = OTHER; note = 2'-O-methyl ribonucleotide
  modified_base 71: mod_base = OTHER; note = 2'-O-methyl ribonucleotide
  modified_base 72: mod_base = OTHER; note = 2'-O-methyl ribonucleotide
  modified_base 74: mod_base = OTHER; note = 2'-O-methyl ribonucleotide
  modified_base 75: mod_base = OTHER; note = 2'-O-methyl ribonucleotide
  modified_base 76: mod_base = OTHER; note = 2'-O-methyl ribonucleotide
  modified_base 77: mod_base = OTHER; note = 2'-O-methyl ribonucleotide
  modified_base 78: mod_base = OTHER; note = 2'-O-methyl ribonucleotide
  modified_base 79: mod_base = OTHER; note = 2'-O-methyl ribonucleotide
  modified_base 80: mod_base = OTHER; note = 2'-O-methyl ribonucleotide
  modified_base 82: mod_base = OTHER; note = 2'-O-methyl ribonucleotide
  modified_base 83: mod_base = OTHER; note = 2'-O-methyl ribonucleotide
  modified_base 84: mod_base = OTHER; note = 2'-O-methyl ribonucleotide
  modified_base 85: mod_base = OTHER; note = 2'-O-methyl ribonucleotide
  modified_base 86: mod_base = OTHER; note = 2'-O-methyl ribonucleotide
  modified_base 87: mod_base = OTHER; note = 2'-O-methyl ribonucleotide
  modified_base 89: mod_base = OTHER; note = 2'-O-methyl ribonucleotide
  modified_base 92: mod_base = OTHER; note = 2'-O-methyl ribonucleotide
  modified_base 93: mod_base = OTHER; note = 2'-O-methyl ribonucleotide
  modified_base 94: mod_base = OTHER; note = 2'-O-methyl ribonucleotide
  modified_base 95: mod_base = OTHER; note = 2'-O-methyl ribonucleotide
  modified_base 96: mod_base = OTHER; note = 2'-O-methyl ribonucleotide
  modified_base 97: mod_base = OTHER; note = 2'-O-methyl ribonucleotide
  modified_base 98: mod_base = OTHER; note = 2'-O-methyl ribonucleotide
  modified_base 99: mod_base = OTHER; note = 2'-O-methyl ribonucleotide
  modified_base 100: mod_base = OTHER; note = 2'-O-methyl ribonucleotide
  modified_base 101: mod_base = OTHER; note = uniform ribonucleotides (A, C, G, inosine or U), deoxynucleotides (A, G, C, inosine or T), ribonebularine, 2'-O-methylnebularine or deoxynebularine
  modified_base 102: mod_base = OTHER; note = uniform ribonucleotides (A, C, G, inosine or U), deoxynucleotides (A, G, C, inosine or T), ribonebularine, 2'-O-methylnebularine or deoxynebularine
  modified_base 103: mod_base = OTHER; note = uniform ribonucleotides (A, C, G, inosine or U), deoxynucleotides (A, G, C, inosine or T), ribonebularine, 2'-O-methylnebularine or deoxynebularine
  modified_base 1..3: mod_base = OTHER; note = phosphorothioate linkage
  modified_base 25..26: mod_base = OTHER; note = phosphorothioate linkage
  modified_base 64..65: mod_base = OTHER; note = phosphorothioate linkage
  modified_base 98..100: mod_base = OTHER; note = phosphorothioate linkage
  misc_feature 1..100: note = RNA
  misc_feature 101..103: note = Optionally DNA or RNA

SEQ ID NO: 3137 - DNA, 103 bp, synthetic construct; identical to SEQ ID NO: 1795
  source 1..103: mol_type = other DNA
  modified_base 1: mod_base = OTHER; note = 2'-O-methyl ribonucleotide
  modified_base 2: mod_base = OTHER; note = 2'-O-methyl ribonucleotide
  modified_base 3: mod_base = OTHER; note = 2'-O-methyl ribonucleotide
  modified_base 21: mod_base = OTHER; note = 2'-O-methyl ribonucleotide
  modified_base 28: mod_base = OTHER; note = 2'-O-methyl ribonucleotide
  modified_base 29: mod_base = OTHER; note = 2'-O-methyl ribonucleotide
  modified_base 30: mod_base = OTHER; note = 2'-O-methyl ribonucleotide
  modified_base 31: mod_base = OTHER; note = 2'-O-methyl ribonucleotide
  modified_base 32: mod_base = OTHER; note = 2'-O-methyl ribonucleotide
  modified_base 33: mod_base = OTHER; note = 2'-O-methyl ribonucleotide
  modified_base 34: mod_base = OTHER; note = 2'-O-methyl ribonucleotide
  modified_base 35: mod_base = OTHER; note = 2'-O-methyl ribonucleotide
  modified_base 36: mod_base = OTHER; note = 2'-O-methyl ribonucleotide
  modified_base 37: mod_base = OTHER; note = 2'-O-methyl ribonucleotide
  modified_base 38: mod_base = OTHER; note = 2'-O-methyl ribonucleotide
  modified_base 39: mod_base = OTHER; note = 2'-O-methyl ribonucleotide
  modified_base 40: mod_base = OTHER; note = 2'-O-methyl ribonucleotide
  modified_base 41: mod_base = OTHER; note = 2'-O-methyl ribonucleotide
  modified_base 42: mod_base = OTHER; note = 2'-O-methyl ribonucleotide
  modified_base 46: mod_base = OTHER; note = 2'-O-methyl ribonucleotide
  modified_base 48: mod_base = OTHER; note = 2'-O-methyl ribonucleotide
  modified_base 50: mod_base = OTHER; note = 2'-O-methyl ribonucleotide
  modified_base 52: mod_base = OTHER; note = 2'-O-methyl ribonucleotide
  modified_base 53: mod_base = OTHER; note = 2'-O-methyl ribonucleotide
  modified_base 54: mod_base = OTHER; note = 2'-O-methyl ribonucleotide
  modified_base 55: mod_base = OTHER; note = 2'-O-methyl ribonucleotide
  modified_base 56: mod_base = OTHER; note = 2'-O-methyl ribonucleotide
  modified_base 57: mod_base = OTHER; note = 2'-O-methyl ribonucleotide
  modified_base 60: mod_base = OTHER; note = 2'-O-methyl ribonucleotide
  modified_base 61: mod_base = OTHER; note = 2'-O-methyl ribonucleotide
  modified_base 66: mod_base = OTHER; note = 2'-O-methyl ribonucleotide
  modified_base 67: mod_base = OTHER; note = 2'-O-methyl ribonucleotide
  modified_base 70: mod_base = OTHER; note = 2'-O-methyl ribonucleotide
  modified_base 71: mod_base = OTHER; note = 2'-O-methyl ribonucleotide
  modified_base 72: mod_base = OTHER; note = 2'-O-methyl ribonucleotide
  modified_base 73: mod_base = OTHER; note = 2'-O-methyl ribonucleotide
  modified_base 74: mod_base = OTHER; note = 2'-O-methyl ribonucleotide
  modified_base 75: mod_base = OTHER; note = 2'-O-methyl ribonucleotide
  modified_base 76: mod_base = OTHER; note = 2'-O-methyl ribonucleotide
  modified_base 77: mod_base = OTHER; note = 2'-O-methyl ribonucleotide
  modified_base 78: mod_base = OTHER; note = 2'-O-methyl ribonucleotide
  modified_base 79: mod_base = OTHER; note = 2'-O-methyl ribonucleotide
  modified_base 80: mod_base = OTHER; note = 2'-O-methyl ribonucleotide
  modified_base 81: mod_base = OTHER; note = 2'-O-methyl ribonucleotide
  modified_base 83: mod_base = OTHER; note = 2'-O-methyl ribonucleotide
  modified_base 84: mod_base = OTHER; note = 2'-O-methyl ribonucleotide
  modified_base 85: mod_base = OTHER; note = 2'-O-methyl ribonucleotide
  modified_base 86: mod_base = OTHER; note = 2'-O-methyl ribonucleotide
  modified_base 87: mod_base = OTHER; note = 2'-O-methyl ribonucleotide
  modified_base 88: mod_base = OTHER; note = 2'-O-methyl ribonucleotide
  modified_base 89: mod_base = OTHER; note = 2'-O-methyl ribonucleotide
  modified_base 90: mod_base = OTHER; note = 2'-O-methyl ribonucleotide
  modified_base 91: mod_base = OTHER; note = 2'-O-methyl ribonucleotide
  modified_base 92: mod_base = OTHER; note = 2'-O-methyl ribonucleotide
  modified_base 93: mod_base = OTHER; note = 2'-O-methyl ribonucleotide
  modified_base 94: mod_base = OTHER; note = 2'-O-methyl ribonucleotide
  modified_base 95: mod_base = OTHER; note = 2'-O-methyl ribonucleotide
  modified_base 96: mod_base = OTHER; note = 2'-O-methyl ribonucleotide
  modified_base 97: mod_base = OTHER; note = 2'-O-methyl ribonucleotide
  modified_base 98: mod_base = OTHER; note = 2'-O-methyl ribonucleotide
  modified_base 99: mod_base = OTHER; note = 2'-O-methyl ribonucleotide
  modified_base 100: mod_base = OTHER; note = 2'-O-methyl ribonucleotide
  modified_base 101: mod_base = OTHER; note = uniform ribonucleotides (A, C, G, inosine or U), deoxynucleotides (A, G, C, inosine or T), ribonebularine, 2'-O-methylnebularine or deoxynebularine
  modified_base 102: mod_base = OTHER; note = uniform ribonucleotides (A, C, G, inosine or U), deoxynucleotides (A, G, C, inosine or T), ribonebularine, 2'-O-methylnebularine or deoxynebularine
  modified_base 103: mod_base = OTHER; note = uniform ribonucleotides (A, C, G, inosine or U), deoxynucleotides (A, G, C, inosine or T), ribonebularine, 2'-O-methylnebularine or deoxynebularine
  modified_base 1..3: mod_base = OTHER; note = phosphorothioate linkage
  modified_base 25..26: mod_base = OTHER; note = phosphorothioate linkage
  modified_base 45..46: mod_base = OTHER; note = phosphorothioate linkage
  modified_base 64..65: mod_base = OTHER; note = phosphorothioate linkage
  modified_base 98..100: mod_base = OTHER; note = phosphorothioate linkage
  misc_feature 1..100: note = RNA
  misc_feature 101..103: note = Optionally DNA or RNA

SEQ ID NO: 3138 - DNA, 103 bp, synthetic construct; identical to SEQ ID NO: 1795
  source 1..103: mol_type = other DNA
  modified_base 1: mod_base = OTHER; note = 2'-O-methyl ribonucleotide
  modified_base 2: mod_base = OTHER; note = 2'-O-methyl ribonucleotide
  modified_base 3: mod_base = OTHER; note = 2'-O-methyl ribonucleotide
  modified_base 21: mod_base = OTHER; note = 2'-O-methyl ribonucleotide
  modified_base 28: mod_base = OTHER; note = 2'-O-methyl ribonucleotide
  modified_base 29: mod_base = OTHER; note = 2'-O-methyl ribonucleotide
  modified_base 30: mod_base = OTHER; note = 2'-O-methyl ribonucleotide
  modified_base 31: mod_base = OTHER; note = 2'-O-methyl ribonucleotide
  modified_base 32: mod_base = OTHER; note = 2'-O-methyl ribonucleotide
  modified_base 34: mod_base = OTHER; note = 2'-O-methyl ribonucleotide
  modified_base 35: mod_base = OTHER; note = 2'-O-methyl ribonucleotide
  modified_base 36: mod_base = OTHER; note = 2'-O-methyl ribonucleotide
  modified_base 37: mod_base = OTHER; note = 2'-O-methyl ribonucleotide
  modified_base 38: mod_base = OTHER; note = 2'-O-methyl ribonucleotide
  modified_base 39: mod_base = OTHER; note = 2'-O-methyl ribonucleotide
  modified_base 40: mod_base = OTHER; note = 2'-O-methyl ribonucleotide
  modified_base 41: mod_base = OTHER; note = 2'-O-methyl ribonucleotide
  modified_base 42: mod_base = OTHER; note = 2'-O-methyl ribonucleotide
  modified_base 46: mod_base = OTHER; note = 2'-O-methyl ribonucleotide
  modified_base 48: mod_base = OTHER; note = 2'-O-methyl ribonucleotide
  modified_base 50: mod_base = OTHER; note = 2'-O-methyl ribonucleotide
  modified_base 52: mod_base = OTHER; note = 2'-O-methyl ribonucleotide
  modified_base 53: mod_base = OTHER; note = 2'-O-methyl ribonucleotide
  modified_base 54: mod_base = OTHER; note = 2'-O-methyl ribonucleotide
  modified_base 55: mod_base = OTHER; note = 2'-O-methyl ribonucleotide
  modified_base 56: mod_base = OTHER; note = 2'-O-methyl ribonucleotide
  modified_base 57: mod_base = OTHER; note = 2'-O-methyl ribonucleotide
  modified_base 60: mod_base = OTHER; note = 2'-O-methyl ribonucleotide
  modified_base 61: mod_base = OTHER; note = 2'-O-methyl ribonucleotide
  modified_base 66: mod_base = OTHER; note = 2'-O-methyl ribonucleotide
  modified_base 67: mod_base = OTHER; note = 2'-O-methyl ribonucleotide
  modified_base 70: mod_base = OTHER; note = 2'-O-methyl ribonucleotide
  modified_base 71: mod_base = OTHER; note = 2'-O-methyl ribonucleotide
  modified_base 72: mod_base = OTHER; note = 2'-O-methyl ribonucleotide
  modified_base 74: mod_base = OTHER; note = 2'-O-methyl ribonucleotide
  modified_base 75: mod_base = OTHER; note = 2'-O-methyl ribonucleotide
  modified_base 76: mod_base = OTHER; note = 2'-O-methyl ribonucleotide
  modified_base 77: mod_base = OTHER; note = 2'-O-methyl ribonucleotide
  modified_base 78: mod_base = OTHER; note = 2'-O-methyl ribonucleotide
  modified_base 79: mod_base = OTHER; note = 2'-O-methyl ribonucleotide
  modified_base 80: mod_base = OTHER; note = 2'-O-methyl ribonucleotide
  modified_base 81: mod_base = OTHER; note = 2'-O-methyl ribonucleotide
  modified_base 83: mod_base = OTHER; note = 2'-O-methyl ribonucleotide
  modified_base 84: mod_base = OTHER; note = 2'-O-methyl ribonucleotide
  modified_base 85: mod_base = OTHER; note = 2'-O-methyl ribonucleotide
  modified_base 86: mod_base = OTHER; note = 2'-O-methyl ribonucleotide
  modified_base 87: mod_base = OTHER; note = 2'-O-methyl ribonucleotide
  modified_base 88: mod_base = OTHER; note = 2'-O-methyl ribonucleotide
  modified_base 89: mod_base = OTHER; note = 2'-O-methyl ribonucleotide
  modified_base 90: mod_base = OTHER; note = 2'-O-methyl ribonucleotide
  modified_base 91: mod_base = OTHER; note = 2'-O-methyl ribonucleotide
  modified_base 92: mod_base = OTHER; note = 2'-O-methyl ribonucleotide
  modified_base 93: mod_base = OTHER; note = 2'-O-methyl ribonucleotide
  modified_base 94: mod_base = OTHER; note = 2'-O-methyl ribonucleotide
  modified_base 95: mod_base = OTHER; note = 2'-O-methyl ribonucleotide
  modified_base 96: mod_base = OTHER; note = 2'-O-methyl ribonucleotide
  modified_base 97: mod_base = OTHER; note = 2'-O-methyl ribonucleotide
  modified_base 98: mod_base = OTHER; note = 2'-O-methyl ribonucleotide
  modified_base 99: mod_base = OTHER; note = 2'-O-methyl ribonucleotide
  modified_base 100: mod_base = OTHER; note = 2'-O-methyl ribonucleotide
  modified_base 101: mod_base = OTHER; note = uniform ribonucleotides (A, C, G, inosine or U), deoxynucleotides (A, G, C, inosine or T), ribonebularine, 2'-O-methylnebularine or deoxynebularine
  modified_base 102: mod_base = OTHER; note = uniform ribonucleotides (A, C, G, inosine or U), deoxynucleotides (A, G, C, inosine or T), ribonebularine, 2'-O-methylnebularine or deoxynebularine
  modified_base 103: mod_base = OTHER; note = uniform ribonucleotides (A, C, G, inosine or U), deoxynucleotides (A, G, C, inosine or T), ribonebularine, 2'-O-methylnebularine or deoxynebularine
  modified_base 1..3: mod_base = OTHER; note = phosphorothioate linkage
  modified_base 25..26: mod_base = OTHER; note = phosphorothioate linkage
  modified_base 45..46: mod_base = OTHER; note = phosphorothioate linkage
  modified_base 64..65: mod_base = OTHER; note = phosphorothioate linkage
  modified_base 98..100: mod_base = OTHER; note = phosphorothioate linkage
  misc_feature 1..100: note = RNA
  misc_feature 101..103: note = Optionally DNA or RNA

SEQ ID NO: 3139 - DNA, 103 bp, synthetic construct; identical to SEQ ID NO: 1796
  source 1..103: mol_type = other DNA
  modified_base 1: mod_base = OTHER; note = 2'-O-methyl ribonucleotide
  modified_base 2: mod_base = OTHER; note = 2'-O-methyl ribonucleotide
  modified_base 3: mod_base = OTHER; note = 2'-O-methyl ribonucleotide
  modified_base 21: mod_base = OTHER; note = 2'-O-methyl ribonucleotide
  modified_base 28: mod_base = OTHER; note = 2'-O-methyl ribonucleotide
  modified_base 29: mod_base = OTHER; note = 2'-O-methyl ribonucleotide
  modified_base 30: mod_base = OTHER; note = 2'-O-methyl ribonucleotide
  modified_base 31: mod_base = OTHER; note = 2'-O-methyl ribonucleotide
  modified_base 32: mod_base = OTHER; note = 2'-O-methyl ribonucleotide
  modified_base 33: mod_base = OTHER; note = 2'-O-methyl ribonucleotide
  modified_base 34: mod_base = OTHER; note = 2'-O-methyl ribonucleotide
  modified_base 35: mod_base = OTHER; note = 2'-O-methyl ribonucleotide
  modified_base 36: mod_base = OTHER; note = 2'-O-methyl ribonucleotide
  modified_base 37: mod_base = OTHER; note = 2'-O-methyl ribonucleotide
  modified_base 38: mod_base = OTHER; note = 2'-O-methyl ribonucleotide
  modified_base 39: mod_base = OTHER; note = 2'-O-methyl ribonucleotide
  modified_base 40: mod_base = OTHER; note = 2'-O-methyl ribonucleotide
  modified_base 41: mod_base = OTHER; note = 2'-O-methyl ribonucleotide
  modified_base 42: mod_base = OTHER; note = 2'-O-methyl ribonucleotide
  modified_base 46: mod_base = OTHER; note = 2'-O-methyl ribonucleotide
  modified_base 48: mod_base = OTHER; note = 2'-O-methyl ribonucleotide
  modified_base 50: mod_base = OTHER; note = 2'-O-methyl ribonucleotide
  modified_base 52: mod_base = OTHER; note = 2'-O-methyl ribonucleotide
  modified_base 53: mod_base = OTHER; note = 2'-O-methyl ribonucleotide
  modified_base 54: mod_base = OTHER; note = 2'-O-methyl ribonucleotide
  modified_base 55: mod_base = OTHER; note = 2'-O-methyl ribonucleotide
  modified_base 56: mod_base = OTHER; note = 2'-O-methyl ribonucleotide
  modified_base 57: mod_base = OTHER; note = 2'-O-methyl ribonucleotide
  modified_base 60: mod_base = OTHER; note = 2'-O-methyl ribonucleotide
  modified_base 61: mod_base = OTHER; note = 2'-O-methyl ribonucleotide
  modified_base 66: mod_base = OTHER; note = 2'-O-methyl ribonucleotide
  modified_base 67: mod_base = OTHER; note = 2'-O-methyl ribonucleotide
  modified_base 70: mod_base = OTHER; note = 2'-O-methyl ribonucleotide
  modified_base 71: mod_base = OTHER; note = 2'-O-methyl ribonucleotide
  modified_base 72: mod_base = OTHER; note = 2'-O-methyl ribonucleotide
  modified_base 73: mod_base = OTHER; note = 2'-O-methyl ribonucleotide
  modified_base 74: mod_base = OTHER; note = 2'-O-methyl ribonucleotide
  modified_base 75: mod_base = OTHER; note = 2'-O-methyl ribonucleotide
  modified_base 76: mod_base = OTHER; note = 2'-O-methyl ribonucleotide
  modified_base 77: mod_base = OTHER; note = 2'-O-methyl ribonucleotide
  modified_base 78: mod_base = OTHER; note = 2'-O-methyl ribonucleotide
  modified_base 79: mod_base = OTHER; note = 2'-O-methyl ribonucleotide
  modified_base 80: mod_base = OTHER; note = 2'-O-methyl ribonucleotide
  modified_base 81: mod_base = OTHER; note = 2'-O-methyl ribonucleotide
  modified_base 83: mod_base = OTHER; note = 2'-O-methyl ribonucleotide
  modified_base 84: mod_base = OTHER; note = 2'-O-methyl ribonucleotide
  modified_base 85: mod_base = OTHER; note = 2'-O-methyl ribonucleotide
  modified_base 86: mod_base = OTHER; note = 2'-O-methyl ribonucleotide
  modified_base 87: mod_base = OTHER; note = 2'-O-methyl ribonucleotide
  modified_base 88: mod_base = OTHER; note = 2'-O-methyl ribonucleotide
  modified_base 89: mod_base = OTHER; note = 2'-O-methyl ribonucleotide
  modified_base 90: mod_base = OTHER; note = 2'-O-methyl ribonucleotide
  modified_base 91: mod_base = OTHER; note = 2'-O-methyl ribonucleotide
  modified_base 92: mod_base = OTHER; note = 2'-O-methyl ribonucleotide
  modified_base 93: mod_base = OTHER; note = 2'-O-methyl ribonucleotide
  modified_base 94: mod_base = OTHER; note = 2'-O-methyl ribonucleotide
  modified_base 95: mod_base = OTHER; note = 2'-O-methyl ribonucleotide
  modified_base 96: mod_base = OTHER; note = 2'-O-methyl ribonucleotide
  modified_base 97: mod_base = OTHER; note = 2'-O-methyl ribonucleotide
  modified_base 98: mod_base = OTHER; note = 2'-O-methyl ribonucleotide
  modified_base 99: mod_base = OTHER; note = 2'-O-methyl ribonucleotide
  modified_base 100: mod_base = OTHER; note = 2'-O-methyl ribonucleotide
  modified_base 101: mod_base = OTHER; note = uniform ribonucleotides (A, C, G, inosine or U), deoxynucleotides (A, G, C, inosine or T), ribonebularine, 2'-O-methylnebularine or deoxynebularine
  modified_base 102: mod_base = OTHER; note = uniform ribonucleotides (A, C, G, inosine or U), deoxynucleotides (A, G, C, inosine or T), ribonebularine, 2'-O-methylnebularine or deoxynebularine
  modified_base 103: mod_base = OTHER; note = uniform ribonucleotides (A, C, G, inosine or U), deoxynucleotides (A, G, C, inosine or T), ribonebularine, 2'-O-methylnebularine or deoxynebularine
  modified_base 1..3: mod_base = OTHER; note = phosphorothioate linkage
  modified_base 25..26: mod_base = OTHER; note = phosphorothioate linkage
  modified_base 45..46: mod_base = OTHER; note = phosphorothioate linkage
  modified_base 64..65: mod_base = OTHER; note = phosphorothioate linkage
  modified_base 98..100: mod_base = OTHER; note = phosphorothioate linkage
  misc_feature 1..100: note = RNA
  misc_feature 101..103: note = Optionally DNA or RNA

SEQ ID NO: 3140 - DNA, 103 bp, synthetic construct; identical to SEQ ID NO: 1796
  source 1..103: mol_type = other DNA
  modified_base 1: mod_base = OTHER; note = 2'-O-methyl ribonucleotide
  modified_base 2: mod_base = OTHER; note = 2'-O-methyl ribonucleotide
  modified_base 3: mod_base = OTHER; note = 2'-O-methyl ribonucleotide
  modified_base 21: mod_base = OTHER; note = 2'-O-methyl ribonucleotide
  modified_base 28: mod_base = OTHER; note = 2'-O-methyl ribonucleotide
  modified_base 29: mod_base = OTHER; note = 2'-O-methyl ribonucleotide
  modified_base 30: mod_base = OTHER; note = 2'-O-methyl ribonucleotide
  modified_base 31: mod_base = OTHER; note = 2'-O-methyl ribonucleotide
  modified_base 32: mod_base = OTHER; note = 2'-O-methyl ribonucleotide
  modified_base 34: mod_base = OTHER; note = 2'-O-methyl ribonucleotide
  modified_base 35: mod_base = OTHER; note = 2'-O-methyl ribonucleotide
  modified_base 36: mod_base = OTHER; note = 2'-O-methyl ribonucleotide
  modified_base 37: mod_base = OTHER; note = 2'-O-methyl ribonucleotide
  modified_base 38: mod_base = OTHER; note = 2'-O-methyl ribonucleotide
  modified_base 39: mod_base = OTHER; note = 2'-O-methyl ribonucleotide
  modified_base 40: mod_base = OTHER; note = 2'-O-methyl ribonucleotide
  modified_base 41: mod_base = OTHER; note = 2'-O-methyl ribonucleotide
  modified_base 42: mod_base = OTHER; note = 2'-O-methyl ribonucleotide
  modified_base 46: mod_base = OTHER; note = 2'-O-methyl ribonucleotide
  modified_base 48: mod_base = OTHER; note = 2'-O-methyl ribonucleotide
  modified_base 50: mod_base = OTHER; note = 2'-O-methyl ribonucleotide
  modified_base 52: mod_base = OTHER; note = 2'-O-methyl ribonucleotide
  modified_base 53: mod_base = OTHER; note = 2'-O-methyl ribonucleotide
  modified_base 54: mod_base = OTHER; note = 2'-O-methyl ribonucleotide
  modified_base 55: mod_base = OTHER; note = 2'-O-methyl ribonucleotide
  modified_base 56: mod_base = OTHER; note = 2'-O-methyl ribonucleotide
  modified_base 57: mod_base = OTHER; note = 2'-O-methyl ribonucleotide
  modified_base 60: mod_base = OTHER; note = 2'-O-methyl ribonucleotide
  modified_base 61: mod_base = OTHER; note = 2'-O-methyl ribonucleotide
  modified_base 66: mod_base = OTHER; note = 2'-O-methyl ribonucleotide
  modified_base 67: mod_base = OTHER; note = 2'-O-methyl ribonucleotide
  modified_base 70: mod_base = OTHER; note = 2'-O-methyl ribonucleotide
  modified_base 71: mod_base = OTHER; note = 2'-O-methyl ribonucleotide
  modified_base 72: mod_base = OTHER; note = 2'-O-methyl ribonucleotide
  modified_base 74: mod_base = OTHER; note = 2'-O-methyl ribonucleotide
  modified_base 75: mod_base = OTHER; note = 2'-O-methyl ribonucleotide
  modified_base 76: mod_base = OTHER; note = 2'-O-methyl ribonucleotide
  modified_base 77: mod_base = OTHER; note = 2'-O-methyl ribonucleotide
  modified_base 78: mod_base = OTHER; note = 2'-O-methyl ribonucleotide
  modified_base 79: mod_base = OTHER; note = 2'-O-methyl ribonucleotide
  modified_base 80: mod_base = OTHER; note = 2'-O-methyl ribonucleotide
  modified_base 81: mod_base = OTHER; note = 2'-O-methyl ribonucleotide
  modified_base 83: mod_base = OTHER; note = 2'-O-methyl ribonucleotide
  modified_base 84: mod_base = OTHER; note = 2'-O-methyl ribonucleotide
  modified_base 85: mod_base = OTHER; note = 2'-O-methyl ribonucleotide
  modified_base 86: mod_base = OTHER; note = 2'-O-methyl ribonucleotide
  modified_base 87: mod_base = OTHER; note = 2'-O-methyl ribonucleotide
  modified_base 88: mod_base = OTHER; note = 2'-O-methyl ribonucleotide
  modified_base 89: mod_base = OTHER; note = 2'-O-methyl ribonucleotide
  modified_base 90: mod_base = OTHER; note = 2'-O-methyl ribonucleotide
  modified_base 91: mod_base = OTHER; note = 2'-O-methyl ribonucleotide
  modified_base 92: mod_base = OTHER; note = 2'-O-methyl ribonucleotide
  modified_base 93: mod_base = OTHER; note = 2'-O-methyl ribonucleotide
  modified_base 94: mod_base = OTHER; note = 2'-O-methyl ribonucleotide
  modified_base 95: mod_base = OTHER; note = 2'-O-methyl ribonucleotide
  modified_base 96: mod_base = OTHER; note = 2'-O-methyl ribonucleotide
  modified_base 97: mod_base = OTHER; note = 2'-O-methyl ribonucleotide
  modified_base 98: mod_base = OTHER; note = 2'-O-methyl ribonucleotide
  modified_base 99: mod_base = OTHER; note = 2'-O-methyl ribonucleotide
  modified_base 100: mod_base = OTHER; note = 2'-O-methyl ribonucleotide
  modified_base 101: mod_base = OTHER; note = uniform ribonucleotides (A, C, G, inosine or U), deoxynucleotides (A, G, C, inosine or T), ribonebularine, 2'-O-methylnebularine or deoxynebularine
  modified_base 102: mod_base = OTHER; note = uniform ribonucleotides (A, C, G, inosine or U), deoxynucleotides (A, G, C, inosine or T), ribonebularine, 2'-O-methylnebularine or deoxynebularine
  modified_base 103: mod_base = OTHER; note = uniform ribonucleotides (A, C, G, inosine or U), deoxynucleotides (A, G, C, inosine or T), ribonebularine, 2'-O-methylnebularine or deoxynebularine
  modified_base 1..3: mod_base = OTHER; note = phosphorothioate linkage
  modified_base 25..26: mod_base = OTHER; note = phosphorothioate linkage
  modified_base 45..46: mod_base = OTHER; note = phosphorothioate linkage
  modified_base 64..65: mod_base = OTHER; note = phosphorothioate linkage
  modified_base 98..100: mod_base = OTHER; note = phosphorothioate linkage
  misc_feature 1..100: note = RNA
  misc_feature 101..103: note = Optionally DNA or RNA

SEQ ID NO: 3141 - DNA, 103 bp, synthetic construct; identical to SEQ ID NO: 1797
  source 1..103: mol_type = other DNA
  modified_base 1: mod_base = OTHER; note = 2'-O-methyl ribonucleotide
  modified_base 2: mod_base = OTHER; note = 2'-O-methyl ribonucleotide
  modified_base 3: mod_base = OTHER; note = 2'-O-methyl ribonucleotide
  modified_base 21: mod_base = OTHER; note = 2'-O-methyl ribonucleotide
  modified_base 28: mod_base = OTHER; note = 2'-O-methyl ribonucleotide
  modified_base 29: mod_base = OTHER; note = 2'-O-methyl ribonucleotide
  modified_base 30: mod_base = OTHER; note = 2'-O-methyl ribonucleotide
  modified_base 31: mod_base = OTHER; note = 2'-O-methyl ribonucleotide
  modified_base 32: mod_base = OTHER; note = 2'-O-methyl ribonucleotide
  modified_base 33: mod_base = OTHER; note = 2'-O-methyl ribonucleotide
  modified_base 34: mod_base = OTHER; note = 2'-O-methyl ribonucleotide
  modified_base 35: mod_base = OTHER; note = 2'-O-methyl ribonucleotide
  modified_base 36: mod_base = OTHER; note = 2'-O-methyl ribonucleotide
  modified_base 37: mod_base = OTHER; note = 2'-O-methyl ribonucleotide
  modified_base 38: mod_base = OTHER; note = 2'-O-methyl ribonucleotide
  modified_base 39: mod_base = OTHER; note = 2'-O-methyl ribonucleotide
  modified_base 40: mod_base = OTHER; note = 2'-O-methyl ribonucleotide
  modified_base 41: mod_base = OTHER; note = 2'-O-methyl ribonucleotide
  modified_base 42: mod_base = OTHER; note = 2'-O-methyl ribonucleotide
  modified_base 46: mod_base = OTHER; note = 2'-O-methyl ribonucleotide
  modified_base 48: mod_base = OTHER; note = 2'-O-methyl ribonucleotide
  modified_base 50: mod_base = OTHER; note = 2'-O-methyl ribonucleotide
  modified_base 52: mod_base = OTHER; note = 2'-O-methyl ribonucleotide
  modified_base 53: mod_base = OTHER; note = 2'-O-methyl ribonucleotide
  modified_base 54: mod_base = OTHER; note = 2'-O-methyl ribonucleotide
  modified_base 57: mod_base = OTHER; note = 2'-O-methyl ribonucleotide
  modified_base 61: mod_base = OTHER; note = 2'-O-methyl ribonucleotide
  modified_base 66: mod_base = OTHER; note = 2'-O-methyl ribonucleotide
  modified_base 67: mod_base = OTHER; note = 2'-O-methyl ribonucleotide
  modified_base 70: mod_base = OTHER; note = 2'-O-methyl ribonucleotide
  modified_base 71: mod_base = OTHER; note = 2'-O-methyl ribonucleotide
  modified_base 72: mod_base = OTHER; note = 2'-O-methyl ribonucleotide
  modified_base 74: mod_base = OTHER; note = 2'-O-methyl ribonucleotide
  modified_base 75: mod_base = OTHER; note = 2'-O-methyl ribonucleotide
  modified_base 76: mod_base = OTHER; note = 2'-O-methyl ribonucleotide
  modified_base 77: mod_base = OTHER; note = 2'-O-methyl ribonucleotide
  modified_base 78: mod_base = OTHER; note = 2'-O-methyl ribonucleotide
  modified_base 79: mod_base = OTHER; note = 2'-O-methyl ribonucleotide
  modified_base 80: mod_base = OTHER; note = 2'-O-methyl ribonucleotide
  modified_base 82: mod_base = OTHER; note = 2'-O-methyl ribonucleotide
  modified_base 83: mod_base = OTHER; note = 2'-O-methyl ribonucleotide
  modified_base 84: mod_base = OTHER; note = 2'-O-methyl ribonucleotide
  modified_base 85: mod_base = OTHER; note = 2'-O-methyl ribonucleotide
  modified_base 86: mod_base = OTHER; note = 2'-O-methyl ribonucleotide
  modified_base 87: mod_base = OTHER; note = 2'-O-methyl ribonucleotide
  modified_base 89: mod_base = OTHER; note = 2'-O-methyl ribonucleotide
  modified_base 92: mod_base = OTHER; note = 2'-O-methyl ribonucleotide
  modified_base 93: mod_base = OTHER; note = 2'-O-methyl ribonucleotide
  modified_base 94: mod_base = OTHER; note = 2'-O-methyl ribonucleotide
  modified_base 95: mod_base = OTHER; note = 2'-O-methyl ribonucleotide
  modified_base 96: mod_base = OTHER; note = 2'-O-methyl ribonucleotide
  modified_base 97: mod_base = OTHER; note = 2'-O-methyl ribonucleotide
  modified_base 98: mod_base = OTHER; note = 2'-O-methyl ribonucleotide
  modified_base 99: mod_base = OTHER; note = 2'-O-methyl ribonucleotide
  modified_base 100: mod_base = OTHER; note = 2'-O-methyl ribonucleotide
  modified_base 101: mod_base = OTHER; note = uniform ribonucleotides (A, C, G, inosine or U), deoxynucleotides (A, G, C, inosine or T), ribonebularine, 2'-O-methylnebularine or deoxynebularine
  modified_base 102: mod_base = OTHER; note = uniform ribonucleotides (A, C, G, inosine or U), deoxynucleotides (A, G, C, inosine or T), ribonebularine, 2'-O-methylnebularine or deoxynebularine
  modified_base 103: mod_base = OTHER; note = uniform ribonucleotides (A, C, G, inosine or U), deoxynucleotides (A, G, C, inosine or T), ribonebularine, 2'-O-methylnebularine or deoxynebularine
  modified_base 1..3: mod_base = OTHER; note = phosphorothioate linkage
  modified_base 25..26: mod_base = OTHER; note = phosphorothioate linkage
  modified_base 45..46: mod_base = OTHER; note = phosphorothioate linkage
  modified_base 64..65: mod_base = OTHER; note = phosphorothioate linkage
  modified_base 98..100: mod_base = OTHER; note = phosphorothioate linkage
  misc_feature 1..100: note = RNA
  misc_feature 101..103: note = Optionally DNA or RNA

SEQ ID NO: 3142 - DNA, 103 bp, synthetic construct; identical to SEQ ID NO: 1797
  source 1..103: mol_type = other DNA
  modified_base 1: mod_base = OTHER; note = 2'-O-methyl ribonucleotide
  modified_base 2: mod_base = OTHER; note = 2'-O-methyl ribonucleotide
  modified_base 3: mod_base = OTHER; note = 2'-O-methyl ribonucleotide
  modified_base 21: mod_base = OTHER; note = 2'-O-methyl ribonucleotide
  modified_base 28: mod_base = OTHER; note = 2'-O-methyl ribonucleotide
  modified_base 29: mod_base = OTHER; note = 2'-O-methyl ribonucleotide
  modified_base 30: mod_base = OTHER; note = 2'-O-methyl ribonucleotide
  modified_base 31: mod_base = OTHER; note = 2'-O-methyl ribonucleotide
  modified_base 32: mod_base = OTHER; note = 2'-O-methyl ribonucleotide
  modified_base 33: mod_base = OTHER; note = 2'-O-methyl ribonucleotide
  modified_base 34: mod_base = OTHER; note = 2'-O-methyl ribonucleotide
  modified_base 35: mod_base = OTHER; note = 2'-O-methyl ribonucleotide
  modified_base 36: mod_base = OTHER; note = 2'-O-methyl ribonucleotide
  modified_base 37: mod_base = OTHER; note = 2'-O-methyl ribonucleotide
  modified_base 38: mod_base = OTHER; note = 2'-O-methyl ribonucleotide
  modified_base 39: mod_base = OTHER; note = 2'-O-methyl ribonucleotide
  modified_base 40: mod_base = OTHER; note = 2'-O-methyl ribonucleotide
  modified_base 41: mod_base = OTHER; note = 2'-O-methyl ribonucleotide
  modified_base 42: mod_base = OTHER; note = 2'-O-methyl ribonucleotide
  modified_base 46: mod_base = OTHER; note = 2'-O-methyl ribonucleotide
  modified_base 48: mod_base = OTHER; note = 2'-O-methyl ribonucleotide
  modified_base 50: mod_base = OTHER; note = 2'-O-methyl ribonucleotide
  modified_base 52: mod_base = OTHER; note = 2'-O-methyl ribonucleotide
  modified_base 53: mod_base = OTHER; note = 2'-O-methyl ribonucleotide
  modified_base 54: mod_base = OTHER; note = 2'-O-methyl ribonucleotide
  modified_base 55: mod_base = OTHER; note = 2'-O-methyl ribonucleotide
  modified_base 56: mod_base = OTHER; note = 2'-O-methyl ribonucleotide
  modified_base 57: mod_base = OTHER; note = 2'-O-methyl ribonucleotide
  modified_base 60: mod_base = OTHER; note = 2'-O-methyl ribonucleotide
  modified_base 61: mod_base = OTHER; note = 2'-O-methyl ribonucleotide
  modified_base 66: mod_base = OTHER; note = 2'-O-methyl ribonucleotide
  modified_base 67: mod_base = OTHER; note = 2'-O-methyl ribonucleotide
  modified_base 70: mod_base = OTHER; note = 2'-O-methyl ribonucleotide
  modified_base 71: mod_base = OTHER; note = 2'-O-methyl ribonucleotide
  modified_base 72: mod_base = OTHER; note = 2'-O-methyl ribonucleotide
  modified_base 74: mod_base = OTHER; note = 2'-O-methyl ribonucleotide
  modified_base 75: mod_base = OTHER; note = 2'-O-methyl ribonucleotide
  modified_base 76: mod_base = OTHER; note = 2'-O-methyl ribonucleotide
  modified_base 77: mod_base = OTHER; note = 2'-O-methyl ribonucleotide
  modified_base 78: mod_base = OTHER; note = 2'-O-methyl ribonucleotide
  modified_base 79: mod_base = OTHER; note = 2'-O-methyl ribonucleotide
  modified_base 80: mod_base = OTHER; note = 2'-O-methyl ribonucleotide
  modified_base 82: mod_base = OTHER; note = 2'-O-methyl ribonucleotide
  modified_base 83: mod_base = OTHER; note = 2'-O-methyl ribonucleotide
  modified_base 84: mod_base = OTHER; note = 2'-O-methyl ribonucleotide
  modified_base 85: mod_base = OTHER; note = 2'-O-methyl ribonucleotide
  modified_base 86: mod_base = OTHER; note = 2'-O-methyl ribonucleotide
  modified_base 87: mod_base = OTHER; note = 2'-O-methyl ribonucleotide
  modified_base 89: mod_base = OTHER; note = 2'-O-methyl ribonucleotide
  modified_base 92: mod_base = OTHER; note = 2'-O-methyl ribonucleotide
  modified_base 93: mod_base = OTHER; note = 2'-O-methyl ribonucleotide
  modified_base 94: mod_base = OTHER; note = 2'-O-methyl ribonucleotide
  modified_base 95: mod_base = OTHER; note = 2'-O-methyl ribonucleotide
  modified_base 96: mod_base = OTHER; note = 2'-O-methyl ribonucleotide
  modified_base 97: mod_base = OTHER; note = 2'-O-methyl ribonucleotide
  modified_base 98: mod_base = OTHER; note = 2'-O-methyl ribonucleotide
  modified_base 99: mod_base = OTHER; note = 2'-O-methyl ribonucleotide
  modified_base 100: mod_base = OTHER; note = 2'-O-methyl ribonucleotide
  modified_base 101: mod_base = OTHER; note = uniform ribonucleotides (A, C, G, inosine or U), deoxynucleotides (A, G, C, inosine or T), ribonebularine, 2'-O-methylnebularine or deoxynebularine
  modified_base 102: mod_base = OTHER; note = uniform ribonucleotides (A, C, G, inosine or U), deoxynucleotides (A, G, C, inosine or T), ribonebularine, 2'-O-methylnebularine or deoxynebularine
  modified_base 103: mod_base = OTHER; note = uniform ribonucleotides (A, C, G, inosine or U), deoxynucleotides (A, G, C, inosine or T), ribonebularine, 2'-O-methylnebularine or deoxynebularine
  modified_base 1..3: mod_base = OTHER; note = phosphorothioate linkage
  modified_base 25..26: mod_base = OTHER; note = phosphorothioate linkage
  modified_base 45..46: mod_base = OTHER; note = phosphorothioate linkage
  modified_base 64..65: mod_base = OTHER; note = phosphorothioate linkage
  modified_base 98..100: mod_base = OTHER; note = phosphorothioate linkage
  misc_feature 1..100: note = RNA
  misc_feature 101..103: note = Optionally DNA or RNA

SEQ ID NO: 3143 - DNA, 103 bp, synthetic construct; identical to SEQ ID NO: 1797
  source 1..103: mol_type = other DNA
  modified_base 1: mod_base = OTHER; note = 2'-O-methyl ribonucleotide
  modified_base 2: mod_base = OTHER; note = 2'-O-methyl ribonucleotide
  modified_base 3: mod_base = OTHER; note = 2'-O-methyl ribonucleotide
  modified_base 21: mod_base = OTHER; note = 2'-O-methyl ribonucleotide
  modified_base 28: mod_base = OTHER; note = 2'-O-methyl ribonucleotide
  modified_base 29: mod_base = OTHER; note = 2'-O-methyl ribonucleotide
  modified_base 30: mod_base = OTHER; note = 2'-O-methyl ribonucleotide
  modified_base 31: mod_base = OTHER; note = 2'-O-methyl ribonucleotide
  modified_base 32: mod_base = OTHER; note = 2'-O-methyl ribonucleotide
  modified_base 33: mod_base = OTHER; note = 2'-O-methyl ribonucleotide
  modified_base 34: mod_base = OTHER; note = 2'-O-methyl ribonucleotide
  modified_base 35: mod_base = OTHER; note = 2'-O-methyl ribonucleotide
  modified_base 36: mod_base = OTHER; note = 2'-O-methyl ribonucleotide
  modified_base 37: mod_base = OTHER; note = 2'-O-methyl ribonucleotide
  modified_base 38: mod_base = OTHER; note = 2'-O-methyl ribonucleotide
  modified_base 39: mod_base = OTHER; note = 2'-O-methyl ribonucleotide
  modified_base 40: mod_base = OTHER; note = 2'-O-methyl ribonucleotide
  modified_base 41: mod_base = OTHER; note = 2'-O-methyl ribonucleotide
  modified_base 42: mod_base = OTHER; note = 2'-O-methyl ribonucleotide
  modified_base 46: mod_base = OTHER; note = 2'-O-methyl ribonucleotide
  modified_base 48: mod_base = OTHER; note = 2'-O-methyl ribonucleotide
  modified_base 50: mod_base = OTHER; note = 2'-O-methyl ribonucleotide
  modified_base 52: mod_base = OTHER; note = 2'-O-methyl ribonucleotide
  modified_base 53: mod_base = OTHER; note = 2'-O-methyl ribonucleotide
  modified_base 54: mod_base = OTHER; note = 2'-O-methyl ribonucleotide
  modified_base 57: mod_base = OTHER; note = 2'-O-methyl ribonucleotide
  modified_base 61: mod_base = OTHER; note = 2'-O-methyl ribonucleotide
  modified_base 66: mod_base = OTHER; note = 2'-O-methyl ribonucleotide
  modified_base 67: mod_base = OTHER; note = 2'-O-methyl ribonucleotide
  modified_base 70: mod_base = OTHER; note = 2'-O-methyl ribonucleotide
  modified_base 71: mod_base = OTHER; note = 2'-O-methyl ribonucleotide
  modified_base 72: mod_base = OTHER; note = 2'-O-methyl ribonucleotide
  modified_base 73: mod_base = OTHER; note = 2'-O-methyl ribonucleotide
  modified_base 74: mod_base = OTHER; note = 2'-O-methyl ribonucleotide
  modified_base 75: mod_base = OTHER; note = 2'-O-methyl ribonucleotide
  modified_base 76: mod_base = OTHER; note = 2'-O-methyl ribonucleotide
  modified_base 77: mod_base = OTHER; note = 2'-O-methyl ribonucleotide
  modified_base 78: mod_base = OTHER; note = 2'-O-methyl ribonucleotide
  modified_base 79: mod_base = OTHER; note = 2'-O-methyl ribonucleotide
  modified_base 80: mod_base = OTHER; note = 2'-O-methyl ribonucleotide
  modified_base 82: mod_base = OTHER; note = 2'-O-methyl ribonucleotide
  modified_base 83: mod_base = OTHER; note = 2'-O-methyl ribonucleotide
  modified_base 84: mod_base = OTHER; note = 2'-O-methyl ribonucleotide
  modified_base 85: mod_base = OTHER; note = 2'-O-methyl ribonucleotide
  modified_base 86: mod_base = OTHER; note = 2'-O-methyl ribonucleotide
  modified_base 87: mod_base = OTHER; note = 2'-O-methyl ribonucleotide
  modified_base 89: mod_base = OTHER; note = 2'-O-methyl ribonucleotide
  modified_base 92: mod_base = OTHER; note = 2'-O-methyl ribonucleotide
  modified_base 93: mod_base = OTHER; note = 2'-O-methyl ribonucleotide
  modified_base 94: mod_base = OTHER; note = 2'-O-methyl ribonucleotide
  modified_base 95: mod_base = OTHER; note = 2'-O-methyl ribonucleotide
  modified_base 96: mod_base = OTHER; note = 2'-O-methyl ribonucleotide
  modified_base 97: mod_base = OTHER; note = 2'-O-methyl ribonucleotide
  modified_base 98: mod_base = OTHER; note = 2'-O-methyl ribonucleotide
  modified_base 99: mod_base = OTHER; note = 2'-O-methyl ribonucleotide
  modified_base 100: mod_base = OTHER; note = 2'-O-methyl ribonucleotide
  modified_base 101: mod_base = OTHER; note = uniform ribonucleotides (A, C, G, inosine or U), deoxynucleotides (A, G, C, inosine or T), ribonebularine, 2'-O-methylnebularine or deoxynebularine
  modified_base 102: mod_base = OTHER; note = uniform ribonucleotides (A, C, G, inosine or U), deoxynucleotides (A, G, C, inosine or T), ribonebularine, 2'-O-methylnebularine or deoxynebularine
  modified_base 103: mod_base = OTHER; note = uniform ribonucleotides (A, C, G, inosine or U), deoxynucleotides (A, G, C, inosine or T), ribonebularine, 2'-O-methylnebularine or deoxynebularine
  modified_base 1..3: mod_base = OTHER; note = phosphorothioate linkage
  modified_base 25..26: mod_base = OTHER; note = phosphorothioate linkage
  modified_base 45..46: mod_base = OTHER; note = phosphorothioate linkage
  modified_base 64..65: mod_base = OTHER; note = phosphorothioate linkage
  modified_base 98..100: mod_base = OTHER; note = phosphorothioate linkage
  misc_feature 1..100: note = RNA
  misc_feature 101..103: note = Optionally DNA or RNA

SEQ ID NO: 3144 - DNA, 103 bp, synthetic construct; identical to SEQ ID NO: 1797
  source 1..103: mol_type = other DNA
  modified_base 1: mod_base = OTHER; note = 2'-O-methyl ribonucleotide
  modified_base 2: mod_base = OTHER; note = 2'-O-methyl ribonucleotide
  modified_base 3: mod_base = OTHER; note = 2'-O-methyl ribonucleotide
  modified_base 21: mod_base = OTHER; note = 2'-O-methyl ribonucleotide
  modified_base 28: mod_base = OTHER; note = 2'-O-methyl ribonucleotide
  modified_base 29: mod_base = OTHER; note = 2'-O-methyl ribonucleotide
  modified_base 30: mod_base = OTHER; note = 2'-O-methyl ribonucleotide
  modified_base 31: mod_base = OTHER; note = 2'-O-methyl ribonucleotide
  modified_base 32: mod_base = OTHER; note = 2'-O-methyl ribonucleotide
  modified_base 33: mod_base = OTHER; note = 2'-O-methyl ribonucleotide
  modified_base 34: mod_base = OTHER; note = 2'-O-methyl ribonucleotide
  modified_base 35: mod_base = OTHER; note = 2'-O-methyl ribonucleotide
  modified_base 36: mod_base = OTHER; note = 2'-O-methyl ribonucleotide
  modified_base 37: mod_base = OTHER; note = 2'-O-methyl ribonucleotide
  modified_base 38: mod_base = OTHER; note = 2'-O-methyl ribonucleotide
  modified_base 39: mod_base = OTHER; note = 2'-O-methyl ribonucleotide
  modified_base 40: mod_base = OTHER; note = 2'-O-methyl ribonucleotide
  modified_base 41: mod_base = OTHER; note = 2'-O-methyl ribonucleotide
  modified_base 42: mod_base = OTHER; note = 2'-O-methyl ribonucleotide
  modified_base 46: mod_base = OTHER; note = 2'-O-methyl ribonucleotide
  modified_base 48: mod_base = OTHER; note = 2'-O-methyl ribonucleotide
  modified_base 50: mod_base = OTHER; note = 2'-O-methyl ribonucleotide
  modified_base 52: mod_base = OTHER; note = 2'-O-methyl ribonucleotide
  modified_base 53: mod_base = OTHER; note = 2'-O-methyl ribonucleotide
  modified_base 54: mod_base = OTHER; note = 2'-O-methyl ribonucleotide
  modified_base 57: mod_base = OTHER; note = 2'-O-methyl ribonucleotide
  modified_base 61: mod_base = OTHER; note = 2'-O-methyl ribonucleotide
  modified_base 66: mod_base = OTHER; note = 2'-O-methyl ribonucleotide
  modified_base 67: mod_base = OTHER; note = 2'-O-methyl ribonucleotide
  modified_base 70: mod_base = OTHER; note = 2'-O-methyl ribonucleotide
  modified_base 71: mod_base = OTHER; note = 2'-O-methyl ribonucleotide
  modified_base 72: mod_base = OTHER; note = 2'-O-methyl ribonucleotide
  modified_base 73: mod_base = OTHER; note = 2'-O-methyl ribonucleotide
  modified_base 74: mod_base = OTHER; note = 2'-O-methyl ribonucleotide
  modified_base 75: mod_base = OTHER; note = 2'-O-methyl ribonucleotide
  modified_base 76: mod_base = OTHER; note = 2'-O-methyl ribonucleotide
  modified_base 77: mod_base = OTHER; note = 2'-O-methyl ribonucleotide
  modified_base 78: mod_base = OTHER; note = 2'-O-methyl ribonucleotide
  modified_base 79: mod_base = OTHER; note = 2'-O-methyl ribonucleotide
  modified_base 80: mod_base = OTHER; note = 2'-O-methyl ribonucleotide
  modified_base 82: mod_base = OTHER; note = 2'-O-methyl ribonucleotide
  modified_base 83: mod_base = OTHER; note = 2'-O-methyl ribonucleotide
  modified_base 84: mod_base = OTHER; note = 2'-O-methyl ribonucleotide
  modified_base 85: mod_base = OTHER; note = 2'-O-methyl ribonucleotide
  modified_base 86: mod_base = OTHER; note = 2'-O-methyl ribonucleotide
  modified_base 87: mod_base = OTHER; note = 2'-O-methyl ribonucleotide
  modified_base 89: mod_base = OTHER; note = 2'-O-methyl ribonucleotide
  modified_base 91: mod_base = OTHER; note = 2'-O-methyl ribonucleotide
  modified_base 92: mod_base = OTHER; note = 2'-O-methyl ribonucleotide
  modified_base 93: mod_base = OTHER; note = 2'-O-methyl ribonucleotide
  modified_base 94: mod_base = OTHER; note = 2'-O-methyl ribonucleotide
  modified_base 95: mod_base = OTHER; note = 2'-O-methyl ribonucleotide
  modified_base 96: mod_base = OTHER; note = 2'-O-methyl ribonucleotide
  modified_base 97: mod_base = OTHER; note = 2'-O-methyl ribonucleotide
  modified_base 98: mod_base = OTHER; note = 2'-O-methyl ribonucleotide
  modified_base 99: mod_base = OTHER; note = 2'-O-methyl ribonucleotide
  modified_base 100: mod_base = OTHER; note = 2'-O-methyl ribonucleotide
  modified_base 101: mod_base = OTHER; note = uniform ribonucleotides (A, C, G, inosine or U), deoxynucleotides (A, G, C, inosine or T), ribonebularine, 2'-O-methylnebularine or deoxynebularine
  modified_base 102: mod_base = OTHER; note = uniform ribonucleotides (A, C, G, inosine or U), deoxynucleotides (A, G, C, inosine or T), ribonebularine, 2'-O-methylnebularine or deoxynebularine
  modified_base 103: mod_base = OTHER; note = uniform ribonucleotides (A, C, G, inosine or U), deoxynucleotides (A, G, C, inosine or T), ribonebularine, 2'-O-methylnebularine or deoxynebularine
  modified_base 1..3: mod_base = OTHER; note = phosphorothioate linkage
  modified_base 25..26: mod_base = OTHER; note = phosphorothioate linkage
  modified_base 45..46: mod_base = OTHER; note = phosphorothioate linkage
  modified_base 64..65: mod_base = OTHER; note = phosphorothioate linkage
  modified_base 98..100: mod_base = OTHER; note = phosphorothioate linkage
  misc_feature 1..100: note = RNA
  misc_feature 101..103: note = Optionally DNA or RNA

SEQ ID NO: 3145 - DNA, 103 bp, synthetic construct; identical to SEQ ID NO: 1797
  source 1..103: mol_type = other DNA
  modified_base 1: mod_base = OTHER; note = 2'-O-methyl ribonucleotide
  modified_base 2: mod_base = OTHER; note = 2'-O-methyl ribonucleotide
  modified_base 3: mod_base = OTHER; note = 2'-O-methyl ribonucleotide
  modified_base 21: mod_base = OTHER; note = 2'-O-methyl ribonucleotide
  modified_base 28: mod_base = OTHER; note = 2'-O-methyl ribonucleotide
  modified_base 29: mod_base = OTHER; note = 2'-O-methyl ribonucleotide
  modified_base 30: mod_base = OTHER; note = 2'-O-methyl ribonucleotide
  modified_base 31: mod_base = OTHER; note = 2'-O-methyl ribonucleotide
  modified_base 32: mod_base = OTHER; note = 2'-O-methyl ribonucleotide
  modified_base 34: mod_base = OTHER; note = 2'-O-methyl ribonucleotide
  modified_base 35: mod_base = OTHER; note = 2'-O-methyl ribonucleotide
  modified_base 36: mod_base = OTHER; note = 2'-O-methyl ribonucleotide
  modified_base 37: mod_base = OTHER; note = 2'-O-methyl ribonucleotide
  modified_base 38: mod_base = OTHER; note = 2'-O-methyl ribonucleotide
  modified_base 39: mod_base = OTHER; note = 2'-O-methyl ribonucleotide
  modified_base 40: mod_base = OTHER; note = 2'-O-methyl ribonucleotide
  modified_base 41: mod_base = OTHER; note = 2'-O-methyl ribonucleotide
  modified_base 42: mod_base = OTHER; note = 2'-O-methyl ribonucleotide
  modified_base 46: mod_base = OTHER; note = 2'-O-methyl ribonucleotide
  modified_base 48: mod_base = OTHER; note = 2'-O-methyl ribonucleotide
  modified_base 50: mod_base = OTHER; note = 2'-O-methyl ribonucleotide
  modified_base 52: mod_base = OTHER; note = 2'-O-methyl ribonucleotide
  modified_base 53: mod_base = OTHER; note = 2'-O-methyl ribonucleotide
  modified_base 54: mod_base = OTHER; note = 2'-O-methyl ribonucleotide
  modified_base 57: mod_base = OTHER; note = 2'-O-methyl ribonucleotide
  modified_base 61: mod_base = OTHER; note = 2'-O-methyl ribonucleotide
  modified_base 66: mod_base = OTHER; note = 2'-O-methyl ribonucleotide
  modified_base 67: mod_base = OTHER; note = 2'-O-methyl ribonucleotide
  modified_base 70: mod_base = OTHER; note = 2'-O-methyl ribonucleotide
  modified_base 71: mod_base = OTHER; note = 2'-O-methyl ribonucleotide
  modified_base 72: mod_base = OTHER; note = 2'-O-methyl ribonucleotide
  modified_base 73: mod_base = OTHER; note = 2'-O-methyl ribonucleotide
  modified_base 74: mod_base = OTHER; note = 2'-O-methyl ribonucleotide
  modified_base 75: mod_base = OTHER; note = 2'-O-methyl ribonucleotide
  modified_base 76: mod_base = OTHER; note = 2'-O-methyl ribonucleotide
  modified_base 77: mod_base = OTHER; note = 2'-O-methyl ribonucleotide
  modified_base 78: mod_base = OTHER; note = 2'-O-methyl ribonucleotide
  modified_base 79: mod_base = OTHER; note = 2'-O-methyl ribonucleotide
  modified_base 80: mod_base = OTHER; note = 2'-O-methyl ribonucleotide
  modified_base 82: mod_base = OTHER; note = 2'-O-methyl ribonucleotide
  modified_base 83: mod_base = OTHER; note = 2'-O-methyl ribonucleotide
  modified_base 84: mod_base = OTHER; note = 2'-O-methyl ribonucleotide
  modified_base 85: mod_base = OTHER; note = 2'-O-methyl ribonucleotide
  modified_base 86: mod_base = OTHER; note = 2'-O-methyl ribonucleotide
  modified_base 87: mod_base = OTHER; note = 2'-O-methyl ribonucleotide
  modified_base 89: mod_base = OTHER; note = 2'-O-methyl ribonucleotide
  modified_base 92: mod_base = OTHER; note = 2'-O-methyl ribonucleotide
  modified_base 93: mod_base = OTHER; note = 2'-O-methyl ribonucleotide
  modified_base 94: mod_base = OTHER; note = 2'-O-methyl ribonucleotide
  modified_base 95: mod_base = OTHER; note = 2'-O-methyl ribonucleotide
  modified_base 96: mod_base = OTHER; note = 2'-O-methyl ribonucleotide
  modified_base 97: mod_base = OTHER; note = 2'-O-methyl ribonucleotide
  modified_base 98: mod_base = OTHER; note = 2'-O-methyl ribonucleotide
  modified_base 99: mod_base = OTHER; note = 2'-O-methyl ribonucleotide
  modified_base 100: mod_base = OTHER; note = 2'-O-methyl ribonucleotide
  modified_base 101: mod_base = OTHER; note = uniform ribonucleotides (A, C, G, inosine or U), deoxynucleotides (A, G, C, inosine or T), ribonebularine, 2'-O-methylnebularine or deoxynebularine
  modified_base 102: mod_base = OTHER; note = uniform ribonucleotides (A, C, G, inosine or U), deoxynucleotides (A, G, C, inosine or T), ribonebularine, 2'-O-methylnebularine or deoxynebularine
  modified_base 103: mod_base = OTHER; note = uniform ribonucleotides (A, C, G, inosine or U), deoxynucleotides (A, G, C, inosine or T), ribonebularine, 2'-O-methylnebularine or deoxynebularine
  modified_base 1..3: mod_base = OTHER; note = phosphorothioate linkage
  modified_base 25..26: mod_base = OTHER; note = phosphorothioate linkage
  modified_base 45..46: mod_base = OTHER; note = phosphorothioate linkage
  modified_base 64..65: mod_base = OTHER; note = phosphorothioate linkage
  modified_base 98..100: mod_base = OTHER; note = phosphorothioate linkage
  misc_feature 1..100: note = RNA
  misc_feature 101..103: note = Optionally DNA or RNA

SEQ ID NO: 3146 - DNA, 103 bp, synthetic construct; identical to SEQ ID NO: 1797
  source 1..103: mol_type = other DNA
  modified_base 1: mod_base = OTHER; note = 2'-O-methyl ribonucleotide
  modified_base 2: mod_base = OTHER; note = 2'-O-methyl ribonucleotide
  modified_base 3: mod_base = OTHER; note = 2'-O-methyl ribonucleotide
  modified_base 21: mod_base = OTHER; note = 2'-O-methyl ribonucleotide
  modified_base 28: mod_base = OTHER; note = 2'-O-methyl ribonucleotide
  modified_base 29: mod_base = OTHER; note = 2'-O-methyl ribonucleotide
  modified_base 30: mod_base = OTHER; note = 2'-O-methyl ribonucleotide
  modified_base 31: mod_base = OTHER; note = 2'-O-methyl ribonucleotide
  modified_base 32: mod_base = OTHER; note = 2'-O-methyl ribonucleotide
  modified_base 34: mod_base = OTHER; note = 2'-O-methyl ribonucleotide
  modified_base 35: mod_base = OTHER; note = 2'-O-methyl ribonucleotide
  modified_base 36: mod_base = OTHER; note = 2'-O-methyl ribonucleotide
  modified_base 37: mod_base = OTHER; note = 2'-O-methyl ribonucleotide
  modified_base 38: mod_base = OTHER; note = 2'-O-methyl ribonucleotide
  modified_base 39: mod_base = OTHER; note = 2'-O-methyl ribonucleotide
  modified_base 40: mod_base = OTHER; note = 2'-O-methyl ribonucleotide
  modified_base 41: mod_base = OTHER; note = 2'-O-methyl ribonucleotide
  modified_base 42: mod_base = OTHER; note = 2'-O-methyl ribonucleotide
  modified_base 46: mod_base = OTHER; note = 2'-O-methyl ribonucleotide
  modified_base 48: mod_base = OTHER; note = 2'-O-methyl ribonucleotide
  modified_base 50: mod_base = OTHER; note = 2'-O-methyl ribonucleotide
  modified_base 52: mod_base = OTHER; note = 2'-O-methyl ribonucleotide
  modified_base 53: mod_base = OTHER; note = 2'-O-methyl ribonucleotide
  modified_base 54: mod_base = OTHER; note = 2'-O-methyl ribonucleotide
  modified_base 57: mod_base = OTHER; note = 2'-O-methyl ribonucleotide
  modified_base 61: mod_base = OTHER; note = 2'-O-methyl ribonucleotide
  modified_base 66: mod_base = OTHER; note = 2'-O-methyl ribonucleotide
  modified_base 67: mod_base = OTHER; note = 2'-O-methyl ribonucleotide
  modified_base 70: mod_base = OTHER; note = 2'-O-methyl ribonucleotide
  modified_base 71: mod_base = OTHER; note = 2'-O-methyl ribonucleotide
  modified_base 72: mod_base = OTHER; note = 2'-O-methyl ribonucleotide
  modified_base 73: mod_base = OTHER; note = 2'-O-methyl ribonucleotide
  modified_base 74: mod_base = OTHER; note = 2'-O-methyl ribonucleotide
  modified_base 75: mod_base = OTHER; note = 2'-O-methyl ribonucleotide
  modified_base 76: mod_base = OTHER; note = 2'-O-methyl ribonucleotide
  modified_base 77: mod_base = OTHER; note = 2'-O-methyl ribonucleotide
  modified_base 78: mod_base = OTHER; note = 2'-O-methyl ribonucleotide
  modified_base 79: mod_base = OTHER; note = 2'-O-methyl ribonucleotide
  modified_base 80: mod_base = OTHER; note = 2'-O-methyl ribonucleotide
  modified_base 82: mod_base = OTHER; note = 2'-O-methyl ribonucleotide
  modified_base 83: mod_base = OTHER; note = 2'-O-methyl ribonucleotide
  modified_base 84: mod_base = OTHER; note = 2'-O-methyl ribonucleotide
  modified_base 85: mod_base = OTHER; note = 2'-O-methyl ribonucleotide
  modified_base 86: mod_base = OTHER; note = 2'-O-methyl ribonucleotide
  modified_base 87: mod_base = OTHER; note = 2'-O-methyl ribonucleotide
  modified_base 89: mod_base = OTHER; note = 2'-O-methyl ribonucleotide
  modified_base 91: mod_base = OTHER; note = 2'-O-methyl ribonucleotide
  modified_base 92: mod_base = OTHER; note = 2'-O-methyl ribonucleotide
  modified_base 93: mod_base = OTHER; note = 2'-O-methyl ribonucleotide
  modified_base 94: mod_base = OTHER; note = 2'-O-methyl ribonucleotide
  modified_base 95: mod_base = OTHER; note = 2'-O-methyl ribonucleotide
  modified_base 96: mod_base = OTHER; note = 2'-O-methyl ribonucleotide
  modified_base 97: mod_base = OTHER; note = 2'-O-methyl ribonucleotide
  modified_base 98: mod_base = OTHER; note = 2'-O-methyl ribonucleotide
  modified_base 99: mod_base = OTHER; note = 2'-O-methyl ribonucleotide
  modified_base 100: mod_base = OTHER; note = 2'-O-methyl ribonucleotide
  modified_base 101: mod_base = OTHER; note = uniform ribonucleotides (A, C, G, inosine or U), deoxynucleotides (A, G, C, inosine or T), ribonebularine, 2'-O-methylnebularine or deoxynebularine
  modified_base 102: mod_base = OTHER; note = uniform ribonucleotides (A, C, G, inosine or U), deoxynucleotides (A, G, C, inosine or T), ribonebularine, 2'-O-methylnebularine or deoxynebularine
  modified_base 103: mod_base = OTHER; note = uniform ribonucleotides (A, C, G, inosine or U), deoxynucleotides (A, G, C, inosine or T), ribonebularine, 2'-O-methylnebularine or deoxynebularine
  modified_base 1..3: mod_base = OTHER; note = phosphorothioate linkage
  modified_base 25..26: mod_base = OTHER; note = phosphorothioate linkage
  modified_base 45..46: mod_base = OTHER; note = phosphorothioate linkage
  modified_base 64..65: mod_base = OTHER; note = phosphorothioate linkage
  modified_base 98..100: mod_base = OTHER; note = phosphorothioate linkage
  misc_feature 1..100: note = RNA
  misc_feature 101..103: note = Optionally DNA or RNA

SEQ ID NO: 3147 - DNA, 103 bp, synthetic construct; identical to SEQ ID NO: 1797
  source 1..103: mol_type = other DNA
  modified_base 1: mod_base = OTHER; note = 2'-O-methyl ribonucleotide
  modified_base 2: mod_base = OTHER; note = 2'-O-methyl ribonucleotide
  modified_base 3: mod_base = OTHER; note = 2'-O-methyl ribonucleotide
  modified_base 21: mod_base = OTHER; note = 2'-O-methyl ribonucleotide
  modified_base 28: mod_base = OTHER; note = 2'-O-methyl ribonucleotide
  modified_base 29: mod_base = OTHER; note = 2'-O-methyl ribonucleotide
  modified_base 30: mod_base = OTHER; note = 2'-O-methyl ribonucleotide
  modified_base 31: mod_base = OTHER; note = 2'-O-methyl ribonucleotide
  modified_base 32: mod_base = OTHER; note = 2'-O-methyl ribonucleotide
  modified_base 34: mod_base = OTHER; note = 2'-O-methyl ribonucleotide
  modified_base 35: mod_base = OTHER; note = 2'-O-methyl ribonucleotide
  modified_base 36: mod_base = OTHER; note = 2'-O-methyl ribonucleotide
  modified_base 37: mod_base = OTHER; note = 2'-O-methyl ribonucleotide
  modified_base 38: mod_base = OTHER; note = 2'-O-methyl ribonucleotide
  modified_base 39: mod_base = OTHER; note = 2'-O-methyl ribonucleotide
  modified_base 40: mod_base = OTHER; note = 2'-O-methyl ribonucleotide
  modified_base 41: mod_base = OTHER; note = 2'-O-methyl ribonucleotide
  modified_base 42: mod_base = OTHER; note = 2'-O-methyl ribonucleotide
  modified_base 46: mod_base = OTHER; note = 2'-O-methyl ribonucleotide
  modified_base 48: mod_base = OTHER; note = 2'-O-methyl ribonucleotide
  modified_base 50: mod_base = OTHER; note = 2'-O-methyl ribonucleotide
  modified_base 52: mod_base = OTHER; note = 2'-O-methyl ribonucleotide
  modified_base 53: mod_base = OTHER; note = 2'-O-methyl ribonucleotide
  modified_base 54: mod_base = OTHER; note = 2'-O-methyl ribonucleotide
  modified_base 55: mod_base = OTHER; note = 2'-O-methyl ribonucleotide
  modified_base 56: mod_base = OTHER; note = 2'-O-methyl ribonucleotide
  modified_base 57: mod_base = OTHER; note = 2'-O-methyl ribonucleotide
  modified_base 60: mod_base = OTHER; note = 2'-O-methyl ribonucleotide
  modified_base 61: mod_base = OTHER; note = 2'-O-methyl ribonucleotide
  modified_base 66: mod_base = OTHER; note = 2'-O-methyl ribonucleotide
  modified_base 67: mod_base = OTHER; note = 2'-O-methyl ribonucleotide
  modified_base 70: mod_base = OTHER; note = 2'-O-methyl ribonucleotide
  modified_base 71: mod_base = OTHER; note = 2'-O-methyl ribonucleotide
  modified_base 72: mod_base = OTHER; note = 2'-O-methyl ribonucleotide
  modified_base 74: mod_base = OTHER; note = 2'-O-methyl ribonucleotide
  modified_base 75: mod_base = OTHER; note = 2'-O-methyl ribonucleotide
  modified_base 76: mod_base = OTHER; note = 2'-O-methyl ribonucleotide
  modified_base 77: mod_base = OTHER; note = 2'-O-methyl ribonucleotide
  modified_base 78: mod_base = OTHER; note = 2'-O-methyl ribonucleotide
  modified_base 79: mod_base = OTHER; note = 2'-O-methyl ribonucleotide
  modified_base 80: mod_base = OTHER; note = 2'-O-methyl ribonucleotide
  modified_base 82: mod_base = OTHER; note = 2'-O-methyl ribonucleotide
  modified_base 83: mod_base = OTHER; note = 2'-O-methyl ribonucleotide
  modified_base 84: mod_base = OTHER; note = 2'-O-methyl ribonucleotide
  modified_base 85: mod_base = OTHER; note = 2'-O-methyl ribonucleotide
  modified_base 86: mod_base = OTHER; note = 2'-O-methyl ribonucleotide
  modified_base 87: mod_base = OTHER; note = 2'-O-methyl ribonucleotide
  modified_base 89: mod_base = OTHER; note = 2'-O-methyl ribonucleotide
  modified_base 92: mod_base = OTHER; note = 2'-O-methyl ribonucleotide
  modified_base 93: mod_base = OTHER; note = 2'-O-methyl ribonucleotide
  modified_base 94: mod_base = OTHER; note = 2'-O-methyl ribonucleotide
  modified_base 95: mod_base = OTHER; note = 2'-O-methyl ribonucleotide
  modified_base 96: mod_base = OTHER; note = 2'-O-methyl ribonucleotide
  modified_base 97: mod_base = OTHER; note = 2'-O-methyl ribonucleotide
  modified_base 98: mod_base = OTHER; note = 2'-O-methyl ribonucleotide
  modified_base 99: mod_base = OTHER; note = 2'-O-methyl ribonucleotide
  modified_base 100: mod_base = OTHER; note = 2'-O-methyl ribonucleotide
  modified_base 101: mod_base = OTHER; note = uniform ribonucleotides (A, C, G, inosine or U), deoxynucleotides (A, G, C, inosine or T), ribonebularine, 2'-O-methylnebularine or deoxynebularine
  modified_base 102: mod_base = OTHER; note = uniform ribonucleotides (A, C, G, inosine or U), deoxynucleotides (A, G, C, inosine or T), ribonebularine, 2'-O-methylnebularine or deoxynebularine
  modified_base 103: mod_base = OTHER; note = uniform ribonucleotides (A, C, G, inosine or U), deoxynucleotides (A, G, C, inosine or T), ribonebularine, 2'-O-methylnebularine or deoxynebularine
  modified_base 1..3: mod_base = OTHER; note = phosphorothioate linkage
  modified_base 25..26: mod_base = OTHER; note = phosphorothioate linkage
  modified_base 45..46: mod_base = OTHER; note = phosphorothioate linkage
  modified_base 64..65: mod_base = OTHER; note = phosphorothioate linkage
  modified_base 98..100: mod_base = OTHER; note = phosphorothioate linkage
  misc_feature 1..100: note = RNA
  misc_feature 101..103: note = Optionally DNA or RNA

SEQ ID NO: 3148 - RNA, 100 nt, synthetic construct; identical to SEQ ID NO: 2109
  source 1..100: mol_type = other RNA
  modified_base 1: mod_base = OTHER; note = 2'-O-methyl ribonucleotide
  modified_base 2: mod_base = OTHER; note = 2'-O-methyl ribonucleotide
  modified_base 3: mod_base = OTHER; note = 2'-O-methyl ribonucleotide
  modified_base 21: mod_base = OTHER; note = 2'-O-methyl ribonucleotide
  modified_base 28: mod_base = OTHER; note = 2'-O-methyl ribonucleotide
  modified_base 29: mod_base = OTHER; note = 2'-O-methyl ribonucleotide
  modified_base 30: mod_base = OTHER; note = 2'-O-methyl ribonucleotide
  modified_base 31: mod_base = OTHER; note = 2'-O-methyl ribonucleotide
  modified_base 32: mod_base = OTHER; note = 2'-O-methyl ribonucleotide
  modified_base 33: mod_base = OTHER; note = 2'-O-methyl ribonucleotide
  modified_base 34: mod_base = OTHER; note = 2'-O-methyl ribonucleotide
  modified_base 35: mod_base = OTHER; note = 2'-O-methyl ribonucleotide
  modified_base 36: mod_base = OTHER; note = 2'-O-methyl ribonucleotide
  modified_base 37: mod_base = OTHER; note = 2'-O-methyl ribonucleotide
  modified_base 38: mod_base = OTHER; note = 2'-O-methyl ribonucleotide
  modified_base 39: mod_base = OTHER; note = 2'-O-methyl ribonucleotide
  modified_base 40: mod_base = OTHER; note = 2'-O-methyl ribonucleotide
  modified_base 41: mod_base = OTHER; note = 2'-O-methyl ribonucleotide
  modified_base 42: mod_base = OTHER; note = 2'-O-methyl ribonucleotide
  modified_base 46: mod_base = OTHER; note = 2'-O-methyl ribonucleotide
  modified_base 48: mod_base = OTHER; note = 2'-O-methyl ribonucleotide
  modified_base 50: mod_base = OTHER; note = 2'-O-methyl ribonucleotide
  modified_base 52: mod_base = OTHER; note = 2'-O-methyl ribonucleotide
  modified_base 53: mod_base = OTHER; note = 2'-O-methyl ribonucleotide
  modified_base 54: mod_base = OTHER; note = 2'-O-methyl ribonucleotide
  modified_base 55: mod_base = OTHER; note = 2'-O-methyl ribonucleotide
  modified_base 56: mod_base = OTHER; note = 2'-O-methyl ribonucleotide
  modified_base 57: mod_base = OTHER; note = 2'-O-methyl ribonucleotide
  modified_base 60: mod_base = OTHER; note = 2'-O-methyl ribonucleotide
  modified_base 61: mod_base = OTHER; note = 2'-O-methyl ribonucleotide
  modified_base 66: mod_base = OTHER; note = 2'-O-methyl ribonucleotide
  modified_base 67: mod_base = OTHER; note = 2'-O-methyl ribonucleotide
  modified_base 70: mod_base = OTHER; note = 2'-O-methyl ribonucleotide
  modified_base 71: mod_base = OTHER; note = 2'-O-methyl ribonucleotide
  modified_base 72: mod_base = OTHER; note = 2'-O-methyl ribonucleotide
  modified_base 73: mod_base = OTHER; note = 2'-O-methyl ribonucleotide
  modified_base 74: mod_base = OTHER; note = 2'-O-methyl ribonucleotide
  modified_base 75: mod_base = OTHER; note = 2'-O-methyl ribonucleotide
  modified_base 76: mod_base = OTHER; note = 2'-O-methyl ribonucleotide
  modified_base 77: mod_base = OTHER; note = 2'-O-methyl ribonucleotide
  modified_base 78: mod_base = OTHER; note = 2'-O-methyl ribonucleotide
  modified_base 79: mod_base = OTHER; note = 2'-O-methyl ribonucleotide
  modified_base 80: mod_base = OTHER; note = 2'-O-methyl ribonucleotide
  modified_base 81: mod_base = OTHER; note = 2'-O-methyl ribonucleotide
  modified_base 83: mod_base = OTHER; note = 2'-O-methyl ribonucleotide
  modified_base 84: mod_base = OTHER; note = 2'-O-methyl ribonucleotide
  modified_base 85: mod_base = OTHER; note = 2'-O-methyl ribonucleotide
  modified_base 86: mod_base = OTHER; note = 2'-O-methyl ribonucleotide
  modified_base 87: mod_base = OTHER; note = 2'-O-methyl ribonucleotide
  modified_base 88: mod_base = OTHER; note = 2'-O-methyl ribonucleotide
  modified_base 89: mod_base = OTHER; note = 2'-O-methyl ribonucleotide
  modified_base 90: mod_base = OTHER; note = 2'-O-methyl ribonucleotide
  modified_base 91: mod_base = OTHER; note = 2'-O-methyl ribonucleotide
  modified_base 92: mod_base = OTHER; note = 2'-O-methyl ribonucleotide
  modified_base 93: mod_base = OTHER; note = 2'-O-methyl ribonucleotide
  modified_base 94: mod_base = OTHER; note = 2'-O-methyl ribonucleotide
  modified_base 95: mod_base = OTHER; note = 2'-O-methyl ribonucleotide
  modified_base 96: mod_base = OTHER; note = 2'-O-methyl ribonucleotide
  modified_base 97: mod_base = OTHER; note = 2'-O-methyl ribonucleotide
  modified_base 98: mod_base = OTHER; note = 2'-O-methyl ribonucleotide
  modified_base 99: mod_base = OTHER; note = 2'-O-methyl ribonucleotide
  modified_base 100: mod_base = OTHER; note = 2'-O-methyl ribonucleotide
  modified_base 98: mod_base = OTHER; note = nebularine
  modified_base 99: mod_base = OTHER; note = nebularine
  modified_base 100: mod_base = OTHER; note = nebularine
  modified_base 1..4: mod_base = OTHER; note = phosphorothioate linkage
  modified_base 97..100: mod_base = OTHER; note = phosphorothioate linkage

SEQ ID NO: 3149 - RNA, 100 nt, synthetic construct; identical to SEQ ID NO: 2111
  source 1..100: mol_type = other RNA
  modified_base 1: mod_base = OTHER; note = 2'-O-methyl ribonucleotide
  modified_base 2: mod_base = OTHER; note = 2'-O-methyl ribonucleotide
  modified_base 3: mod_base = OTHER; note = 2'-O-methyl ribonucleotide
  modified_base 21: mod_base = OTHER; note = 2'-O-methyl ribonucleotide
  modified_base 28: mod_base = OTHER; note = 2'-O-methyl ribonucleotide
  modified_base 29: mod_base = OTHER; note = 2'-O-methyl ribonucleotide
  modified_base 30: mod_base = OTHER; note = 2'-O-methyl ribonucleotide
  modified_base 31: mod_base = OTHER; note = 2'-O-methyl ribonucleotide
  modified_base 32: mod_base = OTHER; note = 2'-O-methyl ribonucleotide
  modified_base 33: mod_base = OTHER; note = 2'-O-methyl ribonucleotide
  modified_base 34: mod_base = OTHER; note = 2'-O-methyl ribonucleotide
  modified_base 35: mod_base = OTHER; note = 2'-O-methyl ribonucleotide
  modified_base 36: mod_base = OTHER; note = 2'-O-methyl ribonucleotide
  modified_base 37: mod_base = OTHER; note = 2'-O-methyl ribonucleotide
  modified_base 38: mod_base = OTHER; note = 2'-O-methyl ribonucleotide
  modified_base 39: mod_base = OTHER; note = 2'-O-methyl ribonucleotide
  modified_base 40: mod_base = OTHER; note = 2'-O-methyl ribonucleotide
  modified_base 41: mod_base = OTHER; note = 2'-O-methyl ribonucleotide
  modified_base 42: mod_base = OTHER; note = 2'-O-methyl ribonucleotide
  modified_base 46: mod_base = OTHER; note = 2'-O-methyl ribonucleotide
  modified_base 48: mod_base = OTHER; note = 2'-O-methyl ribonucleotide
  modified_base 50: mod_base = OTHER; note = 2'-O-methyl ribonucleotide
  modified_base 52: mod_base = OTHER; note = 2'-O-methyl ribonucleotide
  modified_base 53: mod_base = OTHER; note = 2'-O-methyl ribonucleotide
  modified_base 54: mod_base = OTHER; note = 2'-O-methyl ribonucleotide
  modified_base 55: mod_base = OTHER; note = 2'-O-methyl ribonucleotide
  modified_base 56: mod_base = OTHER; note = 2'-O-methyl ribonucleotide
  modified_base 57: mod_base = OTHER; note = 2'-O-methyl ribonucleotide
  modified_base 60: mod_base = OTHER; note = 2'-O-methyl ribonucleotide
  modified_base 61: mod_base = OTHER; note = 2'-O-methyl ribonucleotide
  modified_base 66: mod_base = OTHER; note = 2'-O-methyl ribonucleotide
  modified_base 67: mod_base = OTHER; note = 2'-O-methyl ribonucleotide
  modified_base 70: mod_base = OTHER; note = 2'-O-methyl ribonucleotide
  modified_base 71: mod_base = OTHER; note = 2'-O-methyl ribonucleotide
  modified_base 72: mod_base = OTHER; note = 2'-O-methyl ribonucleotide
  modified_base 73: mod_base = OTHER; note = 2'-O-methyl ribonucleotide
  modified_base 74: mod_base = OTHER; note = 2'-O-methyl ribonucleotide
  modified_base 75: mod_base = OTHER; note = 2'-O-methyl ribonucleotide
  modified_base 76: mod_base = OTHER; note = 2'-O-methyl ribonucleotide
  modified_base 77: mod_base = OTHER; note = 2'-O-methyl ribonucleotide
  modified_base 78: mod_base = OTHER; note = 2'-O-methyl ribonucleotide
  modified_base 79: mod_base = OTHER; note = 2'-O-methyl ribonucleotide
  modified_base 80: mod_base = OTHER; note = 2'-O-methyl ribonucleotide
  modified_base 81: mod_base = OTHER; note = 2'-O-methyl ribonucleotide
  modified_base 83: mod_base = OTHER; note = 2'-O-methyl ribonucleotide
  modified_base 84: mod_base = OTHER; note = 2'-O-methyl ribonucleotide
  modified_base 85: mod_base = OTHER; note = 2'-O-methyl ribonucleotide
  modified_base 86: mod_base = OTHER; note = 2'-O-methyl ribonucleotide
  modified_base 87: mod_base = OTHER; note = 2'-O-methyl ribonucleotide
  modified_base 88: mod_base = OTHER; note = 2'-O-methyl ribonucleotide
  modified_base 89: mod_base = OTHER; note = 2'-O-methyl ribonucleotide
  modified_base 90: mod_base = OTHER; note = 2'-O-methyl ribonucleotide
  modified_base 91: mod_base = OTHER; note = 2'-O-methyl ribonucleotide
  modified_base 92: mod_base = OTHER; note = 2'-O-methyl ribonucleotide
  modified_base 93: mod_base = OTHER; note = 2'-O-methyl ribonucleotide
  modified_base 94: mod_base = OTHER; note = 2'-O-methyl ribonucleotide
  modified_base 95: mod_base = OTHER; note = 2'-O-methyl ribonucleotide
  modified_base 96: mod_base = OTHER; note = 2'-O-methyl ribonucleotide
  modified_base 97: mod_base = OTHER; note = 2'-O-methyl ribonucleotide
  modified_base 98: mod_base = OTHER; note = 2'-O-methyl ribonucleotide
  modified_base 99: mod_base = OTHER; note = 2'-O-methyl ribonucleotide
  modified_base 100: mod_base = OTHER; note = 2'-O-methyl ribonucleotide
  modified_base 99: mod_base = OTHER; note = nebularine
  modified_base 100: mod_base = OTHER; note = nebularine
  modified_base 1..4: mod_base = OTHER; note = phosphorothioate linkage
  modified_base 97..100: mod_base = OTHER; note = phosphorothioate linkage

SEQ ID NO: 3150 - RNA, 100 nt, synthetic construct; identical to SEQ ID NO: 2113
  source 1..100: mol_type = other RNA
  modified_base 1: mod_base = OTHER; note = 2'-O-methyl ribonucleotide
  modified_base 2: mod_base = OTHER; note = 2'-O-methyl ribonucleotide
  modified_base 3: mod_base = OTHER; note = 2'-O-methyl ribonucleotide
  modified_base 21: mod_base = OTHER; note = 2'-O-methyl ribonucleotide
  modified_base 28: mod_base = OTHER; note = 2'-O-methyl ribonucleotide
  modified_base 29: mod_base = OTHER; note = 2'-O-methyl ribonucleotide
  modified_base 30: mod_base = OTHER; note = 2'-O-methyl ribonucleotide
  modified_base 31: mod_base = OTHER; note = 2'-O-methyl ribonucleotide
  modified_base 32: mod_base = OTHER; note = 2'-O-methyl ribonucleotide
  modified_base 33: mod_base = OTHER; note = 2'-O-methyl ribonucleotide
  modified_base 34: mod_base = OTHER; note = 2'-O-methyl ribonucleotide
  modified_base 35: mod_base = OTHER; note = 2'-O-methyl ribonucleotide
  modified_base 36: mod_base = OTHER; note = 2'-O-methyl ribonucleotide
  modified_base 37: mod_base = OTHER; note = 2'-O-methyl ribonucleotide
  modified_base 38: mod_base = OTHER; note = 2'-O-methyl ribonucleotide
  modified_base 39: mod_base = OTHER; note = 2'-O-methyl ribonucleotide
  modified_base 40: mod_base = OTHER; note = 2'-O-methyl ribonucleotide
  modified_base 41: mod_base = OTHER; note = 2'-O-methyl ribonucleotide
  modified_base 42: mod_base = OTHER; note = 2'-O-methyl ribonucleotide
  modified_base 46: mod_base = OTHER; note = 2'-O-methyl ribonucleotide
  modified_base 48: mod_base = OTHER; note = 2'-O-methyl ribonucleotide
  modified_base 50: mod_base = OTHER; note = 2'-O-methyl ribonucleotide
  modified_base 52: mod_base = OTHER; note = 2'-O-methyl ribonucleotide
  modified_base 53: mod_base = OTHER; note = 2'-O-methyl ribonucleotide
  modified_base 54: mod_base = OTHER; note = 2'-O-methyl ribonucleotide
  modified_base 55: mod_base = OTHER; note = 2'-O-methyl ribonucleotide
  modified_base 56: mod_base = OTHER; note = 2'-O-methyl ribonucleotide
  modified_base 57: mod_base = OTHER; note = 2'-O-methyl ribonucleotide
  modified_base 60: mod_base = OTHER; note = 2'-O-methyl ribonucleotide
  modified_base 61: mod_base = OTHER; note = 2'-O-methyl ribonucleotide
  modified_base 66: mod_base = OTHER; note = 2'-O-methyl ribonucleotide
  modified_base 67: mod_base = OTHER; note = 2'-O-methyl ribonucleotide
  modified_base 70: mod_base = OTHER; note = 2'-O-methyl ribonucleotide
  modified_base 71: mod_base = OTHER; note = 2'-O-methyl ribonucleotide
  modified_base 72: mod_base = OTHER; note = 2'-O-methyl ribonucleotide
  modified_base 73: mod_base = OTHER; note = 2'-O-methyl ribonucleotide
  modified_base 74: mod_base = OTHER; note = 2'-O-methyl ribonucleotide
  modified_base 75: mod_base = OTHER; note = 2'-O-methyl ribonucleotide
  modified_base 76: mod_base = OTHER; note = 2'-O-methyl ribonucleotide
  modified_base 77: mod_base = OTHER; note = 2'-O-methyl ribonucleotide
  modified_base 78: mod_base = OTHER; note = 2'-O-methyl ribonucleotide
  modified_base 79: mod_base = OTHER; note = 2'-O-methyl ribonucleotide
  modified_base 80: mod_base = OTHER; note = 2'-O-methyl ribonucleotide
  modified_base 81: mod_base = OTHER; note = 2'-O-methyl ribonucleotide
  modified_base 83: mod_base = OTHER; note = 2'-O-methyl ribonucleotide
  modified_base 84: mod_base = OTHER; note = 2'-O-methyl ribonucleotide
  modified_base 85: mod_base = OTHER; note = 2'-O-methyl ribonucleotide
  modified_base 86: mod_base = OTHER; note = 2'-O-methyl ribonucleotide
  modified_base 87: mod_base = OTHER; note = 2'-O-methyl ribonucleotide
  modified_base 88: mod_base = OTHER; note = 2'-O-methyl ribonucleotide
  modified_base 89: mod_base = OTHER; note = 2'-O-methyl ribonucleotide
  modified_base 90: mod_base = OTHER; note = 2'-O-methyl ribonucleotide
  modified_base 91: mod_base = OTHER; note = 2'-O-methyl ribonucleotide
  modified_base 92: mod_base = OTHER; note = 2'-O-methyl ribonucleotide
  modified_base 93: mod_base = OTHER; note = 2'-O-methyl ribonucleotide
  modified_base 94: mod_base = OTHER; note = 2'-O-methyl ribonucleotide
  modified_base 95: mod_base = OTHER; note = 2'-O-methyl ribonucleotide
  modified_base 96: mod_base = OTHER; note = 2'-O-methyl ribonucleotide
  modified_base 97: mod_base = OTHER; note = 2'-O-methyl ribonucleotide
  modified_base 98: mod_base = OTHER; note = 2'-O-methyl ribonucleotide
  modified_base 99: mod_base = OTHER; note = 2'-O-methyl ribonucleotide
  modified_base 100: mod_base = OTHER; note = 2'-O-methyl ribonucleotide
  modified_base 100: mod_base = OTHER; note = nebularine
  modified_base 1..4: mod_base = OTHER; note = phosphorothioate linkage
  modified_base 97..100: mod_base = OTHER; note = phosphorothioate linkage

SEQ ID NO: 3151 - DNA, 100 bp, synthetic construct; identical to SEQ ID NO: 2115
  source 1..100: mol_type = other DNA
  modified_base 1: mod_base = OTHER; note = 2'-O-methyl ribonucleotide
  modified_base 2: mod_base = OTHER; note = 2'-O-methyl ribonucleotide
  modified_base 3: mod_base = OTHER; note = 2'-O-methyl ribonucleotide
  modified_base 21: mod_base = OTHER; note = 2'-O-methyl ribonucleotide
  modified_base 28: mod_base = OTHER; note = 2'-O-methyl ribonucleotide
  modified_base 29: mod_base = OTHER; note = 2'-O-methyl ribonucleotide
  modified_base 30: mod_base = OTHER; note = 2'-O-methyl ribonucleotide
  modified_base 31: mod_base = OTHER; note = 2'-O-methyl ribonucleotide
  modified_base 32: mod_base = OTHER; note = 2'-O-methyl ribonucleotide
  modified_base 33: mod_base = OTHER; note = 2'-O-methyl ribonucleotide
  modified_base 34: mod_base = OTHER; note = 2'-O-methyl ribonucleotide
  modified_base 35: mod_base = OTHER; note = 2'-O-methyl ribonucleotide
  modified_base 36: mod_base = OTHER; note = 2'-O-methyl ribonucleotide
  modified_base 37: mod_base = OTHER; note = 2'-O-methyl ribonucleotide
  modified_base 38: mod_base = OTHER; note = 2'-O-methyl ribonucleotide
  modified_base 39: mod_base = OTHER; note = 2'-O-methyl ribonucleotide
  modified_base 40: mod_base = OTHER; note = 2'-O-methyl ribonucleotide
  modified_base 41: mod_base = OTHER; note = 2'-O-methyl ribonucleotide
  modified_base 42: mod_base = OTHER; note = 2'-O-methyl ribonucleotide
  modified_base 46: mod_base = OTHER; note = 2'-O-methyl ribonucleotide
  modified_base 48: mod_base = OTHER; note = 2'-O-methyl ribonucleotide
  modified_base 50: mod_base = OTHER; note = 2'-O-methyl ribonucleotide
  modified_base 52: mod_base = OTHER; note = 2'-O-methyl ribonucleotide
  modified_base 53: mod_base = OTHER; note = 2'-O-methyl ribonucleotide
  modified_base 54: mod_base = OTHER; note = 2'-O-methyl ribonucleotide
  modified_base 55: mod_base = OTHER; note = 2'-O-methyl ribonucleotide
  modified_base 56: mod_base = OTHER; note = 2'-O-methyl ribonucleotide
  modified_base 57: mod_base = OTHER; note = 2'-O-methyl ribonucleotide
  modified_base 60: mod_base = OTHER; note = 2'-O-methyl ribonucleotide
  modified_base 61: mod_base = OTHER; note = 2'-O-methyl ribonucleotide
  modified_base 66: mod_base = OTHER; note = 2'-O-methyl ribonucleotide
  modified_base 67: mod_base = OTHER; note = 2'-O-methyl ribonucleotide
  modified_base 70: mod_base = OTHER; note = 2'-O-methyl ribonucleotide
  modified_base 71: mod_base = OTHER; note = 2'-O-methyl ribonucleotide
  modified_base 72: mod_base = OTHER; note = 2'-O-methyl ribonucleotide
  modified_base 73: mod_base = OTHER; note = 2'-O-methyl ribonucleotide
  modified_base 74: mod_base = OTHER; note = 2'-O-methyl ribonucleotide
  modified_base 75: mod_base = OTHER; note = 2'-O-methyl ribonucleotide
  modified_base 76: mod_base = OTHER; note = 2'-O-methyl ribonucleotide
  modified_base 77: mod_base = OTHER; note = 2'-O-methyl ribonucleotide
  modified_base 78: mod_base = OTHER; note = 2'-O-methyl ribonucleotide
  modified_base 79: mod_base = OTHER; note = 2'-O-methyl ribonucleotide
  modified_base 80: mod_base = OTHER; note = 2'-O-methyl ribonucleotide
  modified_base 81: mod_base = OTHER; note = 2'-O-methyl ribonucleotide
  modified_base 83: mod_base = OTHER; note = 2'-O-methyl ribonucleotide
  modified_base 84: mod_base = OTHER; note = 2'-O-methyl ribonucleotide
  modified_base 85: mod_base = OTHER; note = 2'-O-methyl ribonucleotide
  modified_base 86: mod_base = OTHER; note = 2'-O-methyl ribonucleotide
  modified_base 87: mod_base = OTHER; note = 2'-O-methyl ribonucleotide
  modified_base 88: mod_base = OTHER; note = 2'-O-methyl ribonucleotide
  modified_base 89: mod_base = OTHER; note = 2'-O-methyl ribonucleotide
  modified_base 90: mod_base = OTHER; note = 2'-O-methyl ribonucleotide
  modified_base 91: mod_base = OTHER; note = 2'-O-methyl ribonucleotide
  modified_base 92: mod_base = OTHER; note = 2'-O-methyl ribonucleotide
  modified_base 93: mod_base = OTHER; note = 2'-O-methyl ribonucleotide
  modified_base 94: mod_base = OTHER; note = 2'-O-methyl ribonucleotide
  modified_base 95: mod_base = OTHER; note = 2'-O-methyl ribonucleotide
  modified_base 96: mod_base = OTHER; note = 2'-O-methyl ribonucleotide
  modified_base 97: mod_base = OTHER; note = 2'-O-methyl ribonucleotide
  modified_base 98: mod_base = OTHER; note = nebularine
  modified_base 99: mod_base = OTHER; note = nebularine
  modified_base 100: mod_base = OTHER; note = nebularine
  modified_base 1..4: mod_base = OTHER; note = phosphorothioate linkage
  modified_base 97..100: mod_base = OTHER; note = phosphorothioate linkage
  misc_feature 1: note = RNA
  misc_feature 2: note = RNA
  misc_feature 3: note = RNA
  misc_feature 4: note = RNA
  misc_feature 5: note = RNA
  misc_feature 6: note = RNA
  misc_feature 7: note = RNA
  misc_feature 8: note = RNA
  misc_feature 9: note = RNA
  misc_feature 10: note = RNA
  misc_feature 11: note = RNA
  misc_feature 12: note = RNA
  misc_feature 13: note = RNA
  misc_feature 14: note = RNA
  misc_feature 15: note = RNA
  misc_feature 16: note = RNA
  misc_feature 17: note = RNA
  misc_feature 18: note = RNA
  misc_feature 19: note = RNA
  misc_feature 20: note = RNA
  misc_feature 21: note = RNA
  misc_feature 22: note = RNA
  misc_feature 23: note = RNA
  misc_feature 24: note = RNA
  misc_feature 25: note = RNA
  misc_feature 26: note = RNA
  misc_feature 27: note = RNA
  misc_feature 28: note = RNA
  misc_feature 29: note = RNA
  misc_feature 30: note = RNA
  misc_feature 31: note = RNA
  misc_feature 32: note = RNA
  misc_feature 33: note = RNA
  misc_feature 34: note = RNA
  misc_feature 35: note = RNA
  misc_feature 36: note = RNA
  misc_feature 37: note = RNA
  misc_feature 38: note = RNA
  misc_feature 39: note = RNA
  misc_feature 40: note = RNA
  misc_feature 41: note = RNA
  misc_feature 42: note = RNA
  misc_feature 43: note = RNA
  misc_feature 44: note = RNA
  misc_feature 45: note = RNA
  misc_feature 46: note = RNA
  misc_feature 47: note = RNA
  misc_feature 48: note = RNA
  misc_feature 49: note = RNA
  misc_feature 50: note = RNA
  misc_feature 51: note = RNA
  misc_feature 52: note = RNA
  misc_feature 53: note = RNA
  misc_feature 54: note = RNA
  misc_feature 55: note = RNA
  misc_feature 56: note = RNA
  misc_feature 57: note = RNA
  misc_feature 58: note = RNA
  misc_feature 59: note = RNA
  misc_feature 60: note = RNA
  misc_feature 61: note = RNA
  misc_feature 62: note = RNA
  misc_feature 63: note = RNA
  misc_feature 64: note = RNA
  misc_feature 65: note = RNA
  misc_feature 66: note = RNA
  misc_feature 67: note = RNA
  misc_feature 68: note = RNA
  misc_feature 69: note = RNA
  misc_feature 70: note = RNA
  misc_feature 71: note = RNA
  misc_feature 72: note = RNA
  misc_feature 73: note = RNA
  misc_feature 74: note = RNA
  misc_feature 75: note = RNA
  misc_feature 76: note = RNA
  misc_feature 77: note = RNA
  misc_feature 78: note = RNA
  misc_feature 79: note = RNA
  misc_feature 80: note = RNA
  misc_feature 81: note = RNA
  misc_feature 82: note = RNA
  misc_feature 83: note = RNA
  misc_feature 84: note = RNA
  misc_feature 85: note = RNA
  misc_feature 86: note = RNA
  misc_feature 87: note = RNA
  misc_feature 88: note = RNA
  misc_feature 89: note = RNA
  misc_feature 90: note = RNA
  misc_feature 91: note = RNA
  misc_feature 92: note = RNA
  misc_feature 93: note = RNA
  misc_feature 94: note = RNA
  misc_feature 95: note = RNA
  misc_feature 96: note = RNA
  misc_feature 97: note = RNA
  misc_feature 98: note = DNA
  misc_feature 99: note = DNA
  misc_feature 100: note = DNA

SEQ ID NO: 3152 - DNA, 100 bp, synthetic construct; identical to SEQ ID NO: 2117
  source 1..100: mol_type = other DNA
  modified_base 1: mod_base = OTHER; note = 2'-O-methyl ribonucleotide
  modified_base 2: mod_base = OTHER; note = 2'-O-methyl ribonucleotide
  modified_base 3: mod_base = OTHER; note = 2'-O-methyl ribonucleotide
  modified_base 21: mod_base = OTHER; note = 2'-O-methyl ribonucleotide
  modified_base 28: mod_base = OTHER; note = 2'-O-methyl ribonucleotide
  modified_base 29: mod_base = OTHER; note = 2'-O-methyl ribonucleotide
  modified_base 30: mod_base = OTHER; note = 2'-O-methyl ribonucleotide
  modified_base 31: mod_base = OTHER; note = 2'-O-methyl ribonucleotide
  modified_base 32: mod_base = OTHER; note = 2'-O-methyl ribonucleotide
  modified_base 33: mod_base = OTHER; note = 2'-O-methyl ribonucleotide
  modified_base 34: mod_base = OTHER; note = 2'-O-methyl ribonucleotide
  modified_base 35: mod_base = OTHER; note = 2'-O-methyl ribonucleotide
  modified_base 36: mod_base = OTHER; note = 2'-O-methyl ribonucleotide
  modified_base 37: mod_base = OTHER; note = 2'-O-methyl ribonucleotide
  modified_base 38: mod_base = OTHER; note = 2'-O-methyl ribonucleotide
  modified_base 39: mod_base = OTHER; note = 2'-O-methyl ribonucleotide
  modified_base 40: mod_base = OTHER; note = 2'-O-methyl ribonucleotide
  modified_base 41: mod_base = OTHER; note = 2'-O-methyl ribonucleotide
  modified_base 42: mod_base = OTHER; note = 2'-O-methyl ribonucleotide
  modified_base 46: mod_base = OTHER; note = 2'-O-methyl ribonucleotide
  modified_base 48: mod_base = OTHER; note = 2'-O-methyl ribonucleotide
  modified_base 50: mod_base = OTHER; note = 2'-O-methyl ribonucleotide
  modified_base 52: mod_base = OTHER; note = 2'-O-methyl ribonucleotide
  modified_base 53: mod_base = OTHER; note = 2'-O-methyl ribonucleotide
  modified_base 54: mod_base = OTHER; note = 2'-O-methyl ribonucleotide
  modified_base 55: mod_base = OTHER; note = 2'-O-methyl ribonucleotide
  modified_base 56: mod_base = OTHER; note = 2'-O-methyl ribonucleotide
  modified_base 57: mod_base = OTHER; note = 2'-O-methyl ribonucleotide
  modified_base 60: mod_base = OTHER; note = 2'-O-methyl ribonucleotide
  modified_base 61: mod_base = OTHER; note = 2'-O-methyl ribonucleotide
  modified_base 66: mod_base = OTHER; note = 2'-O-methyl ribonucleotide
  modified_base 67: mod_base = OTHER; note = 2'-O-methyl ribonucleotide
  modified_base 70: mod_base = OTHER; note = 2'-O-methyl ribonucleotide
  modified_base 71: mod_base = OTHER; note = 2'-O-methyl ribonucleotide
  modified_base 72: mod_base = OTHER; note = 2'-O-methyl ribonucleotide
  modified_base 73: mod_base = OTHER; note = 2'-O-methyl ribonucleotide
  modified_base 74: mod_base = OTHER; note = 2'-O-methyl ribonucleotide
  modified_base 75: mod_base = OTHER; note = 2'-O-methyl ribonucleotide
  modified_base 76: mod_base = OTHER; note = 2'-O-methyl ribonucleotide
  modified_base 77: mod_base = OTHER; note = 2'-O-methyl ribonucleotide
  modified_base 78: mod_base = OTHER; note = 2'-O-methyl ribonucleotide
  modified_base 79: mod_base = OTHER; note = 2'-O-methyl ribonucleotide
  modified_base 80: mod_base = OTHER; note = 2'-O-methyl ribonucleotide
  modified_base 81: mod_base = OTHER; note = 2'-O-methyl ribonucleotide
  modified_base 83: mod_base = OTHER; note = 2'-O-methyl ribonucleotide
  modified_base 84: mod_base = OTHER; note = 2'-O-methyl ribonucleotide
  modified_base 85: mod_base = OTHER; note = 2'-O-methyl ribonucleotide
  modified_base 86: mod_base = OTHER; note = 2'-O-methyl ribonucleotide
  modified_base 87: mod_base = OTHER; note = 2'-O-methyl ribonucleotide
  modified_base 88: mod_base = OTHER; note = 2'-O-methyl ribonucleotide
  modified_base 89: mod_base = OTHER; note = 2'-O-methyl ribonucleotide
  modified_base 90: mod_base = OTHER; note = 2'-O-methyl ribonucleotide
  modified_base 91: mod_base = OTHER; note = 2'-O-methyl ribonucleotide
  modified_base 92: mod_base = OTHER; note = 2'-O-methyl ribonucleotide
  modified_base 93: mod_base = OTHER; note = 2'-O-methyl ribonucleotide
  modified_base 94: mod_base = OTHER; note = 2'-O-methyl ribonucleotide
  modified_base 95: mod_base = OTHER; note = 2'-O-methyl ribonucleotide
  modified_base 96: mod_base = OTHER; note = 2'-O-methyl ribonucleotide
  modified_base 97: mod_base = OTHER; note = 2'-O-methyl ribonucleotide
  modified_base 98: mod_base = OTHER; note = 2'-O-methyl ribonucleotide
  modified_base 99: mod_base = OTHER; note = nebularine
  modified_base 100: mod_base = OTHER; note = nebularine
  modified_base 1..4: mod_base = OTHER; note = phosphorothioate linkage
  modified_base 97..100: mod_base = OTHER; note = phosphorothioate linkage
  misc_feature 1: note = RNA
  misc_feature 2: note = RNA
  misc_feature 3: note = RNA
  misc_feature 4: note = RNA
  misc_feature 5: note = RNA
  misc_feature 6: note = RNA
  misc_feature 7: note = RNA
  misc_feature 8: note = RNA
  misc_feature 9: note = RNA
  misc_feature 10: note = RNA
  misc_feature 11: note = RNA
  misc_feature 12: note = RNA
  misc_feature 13: note = RNA
  misc_feature 14: note = RNA
  misc_feature 15: note = RNA
  misc_feature 16: note = RNA
  misc_feature 17: note = RNA
  misc_feature 18: note = RNA
  misc_feature 19: note = RNA
  misc_feature 20: note = RNA
  misc_feature 21: note = RNA
  misc_feature 22: note = RNA
  misc_feature 23: note = RNA
  misc_feature 24: note = RNA
  misc_feature 25: note = RNA
  misc_feature 26: note = RNA
  misc_feature 27: note = RNA
  misc_feature 28: note = RNA
  misc_feature 29: note = RNA
  misc_feature 30: note = RNA
  misc_feature 31: note = RNA
  misc_feature 32: note = RNA
  misc_feature 33: note = RNA
  misc_feature 34: note = RNA
  misc_feature 35: note = RNA
  misc_feature 36: note = RNA
  misc_feature 37: note = RNA
  misc_feature 38: note = RNA
  misc_feature 39: note = RNA
  misc_feature 40: note = RNA
  misc_feature 41: note = RNA
  misc_feature 42: note = RNA
  misc_feature 43: note = RNA
  misc_feature 44: note = RNA
  misc_feature 45: note = RNA
  misc_feature 46: note = RNA
  misc_feature 47: note = RNA
  misc_feature 48: note = RNA
  misc_feature 49: note = RNA
  misc_feature 50: note = RNA
  misc_feature 51: note = RNA
  misc_feature 52: note = RNA
  misc_feature 53: note = RNA
  misc_feature 54: note = RNA
  misc_feature 55: note = RNA
  misc_feature 56: note = RNA
  misc_feature 57: note = RNA
  misc_feature 58: note = RNA
  misc_feature 59: note = RNA
  misc_feature 60: note = RNA
  misc_feature 61: note = RNA
  misc_feature 62: note = RNA
  misc_feature 63: note = RNA
  misc_feature 64: note = RNA
  misc_feature 65: note = RNA
  misc_feature 66: note = RNA
  misc_feature 67: note = RNA
  misc_feature 68: note = RNA
  misc_feature 69: note = RNA
  misc_feature 70: note = RNA
  misc_feature 71: note = RNA
  misc_feature 72: note = RNA
  misc_feature 73: note = RNA
  misc_feature 74: note = RNA
  misc_feature 75: note = RNA
  misc_feature 76: note = RNA
  misc_feature 77: note = RNA
  misc_feature 78: note = RNA
  misc_feature 79: note = RNA
  misc_feature 80: note = RNA
  misc_feature 81: note = RNA
  misc_feature 82: note = RNA
  misc_feature 83: note = RNA
  misc_feature 84: note = RNA
  misc_feature 85: note = RNA
  misc_feature 86: note = RNA
  misc_feature 87: note = RNA
  misc_feature 88: note = RNA
  misc_feature 89: note = RNA
  misc_feature 90: note = RNA
  misc_feature 91: note = RNA
  misc_feature 92: note = RNA
  misc_feature 93: note = RNA
  misc_feature 94: note = RNA
  misc_feature 95: note = RNA
  misc_feature 96: note = RNA
  misc_feature 97: note = RNA
  misc_feature 98: note = RNA
  misc_feature 99: note = DNA
  misc_feature 100: note = DNA

SEQ ID NO: 3153 - DNA, 100 bp, synthetic construct; identical to SEQ ID NO: 2119
  source 1..100: mol_type = other DNA
  modified_base 1: mod_base = OTHER; note = 2'-O-methyl ribonucleotide
  modified_base 2: mod_base = OTHER; note = 2'-O-methyl ribonucleotide
  modified_base 3: mod_base = OTHER; note = 2'-O-methyl ribonucleotide
  modified_base 21: mod_base = OTHER; note = 2'-O-methyl ribonucleotide
  modified_base 28: mod_base = OTHER; note = 2'-O-methyl ribonucleotide
  modified_base 29: mod_base = OTHER; note = 2'-O-methyl ribonucleotide
  modified_base 30: mod_base = OTHER; note = 2'-O-methyl ribonucleotide
  modified_base 31: mod_base = OTHER; note = 2'-O-methyl ribonucleotide
  modified_base 32: mod_base = OTHER; note = 2'-O-methyl ribonucleotide
  modified_base 33: mod_base = OTHER; note = 2'-O-methyl ribonucleotide
  modified_base 34: mod_base = OTHER; note = 2'-O-methyl ribonucleotide
  modified_base 35: mod_base = OTHER; note = 2'-O-methyl ribonucleotide
  modified_base 36: mod_base = OTHER; note = 2'-O-methyl ribonucleotide
  modified_base 37: mod_base = OTHER; note = 2'-O-methyl ribonucleotide
  modified_base 38: mod_base = OTHER; note = 2'-O-methyl ribonucleotide
  modified_base 39: mod_base = OTHER; note = 2'-O-methyl ribonucleotide
  modified_base 40: mod_base = OTHER; note = 2'-O-methyl ribonucleotide
  modified_base 41: mod_base = OTHER; note = 2'-O-methyl ribonucleotide
  modified_base 42: mod_base = OTHER; note = 2'-O-methyl ribonucleotide
  modified_base 46: mod_base = OTHER; note = 2'-O-methyl ribonucleotide
  modified_base 48: mod_base = OTHER; note = 2'-O-methyl ribonucleotide
  modified_base 50: mod_base = OTHER; note = 2'-O-methyl ribonucleotide
  modified_base 52: mod_base = OTHER; note = 2'-O-methyl ribonucleotide
  modified_base 53: mod_base = OTHER; note = 2'-O-methyl ribonucleotide
  modified_base 54: mod_base = OTHER; note = 2'-O-methyl ribonucleotide
  modified_base 55: mod_base = OTHER; note = 2'-O-methyl ribonucleotide
  modified_base 56: mod_base = OTHER; note = 2'-O-methyl ribonucleotide
  modified_base 57: mod_base = OTHER; note = 2'-O-methyl ribonucleotide
  modified_base 60: mod_base = OTHER; note = 2'-O-methyl ribonucleotide
  modified_base 61: mod_base = OTHER; note = 2'-O-methyl ribonucleotide
  modified_base 66: mod_base = OTHER; note = 2'-O-methyl ribonucleotide
  modified_base 67: mod_base = OTHER; note = 2'-O-methyl ribonucleotide
  modified_base 70: mod_base = OTHER; note = 2'-O-methyl ribonucleotide
  modified_base 71: mod_base = OTHER; note = 2'-O-methyl ribonucleotide
  modified_base 72: mod_base = OTHER; note = 2'-O-methyl ribonucleotide
  modified_base 73: mod_base = OTHER; note = 2'-O-methyl ribonucleotide
  modified_base 74: mod_base = OTHER; note = 2'-O-methyl ribonucleotide
  modified_base 75: mod_base = OTHER; note = 2'-O-methyl ribonucleotide
  modified_base 76: mod_base = OTHER; note = 2'-O-methyl ribonucleotide
  modified_base 77: mod_base = OTHER; note = 2'-O-methyl ribonucleotide
  modified_base 78: mod_base = OTHER; note = 2'-O-methyl ribonucleotide
  modified_base 79: mod_base = OTHER; note = 2'-O-methyl ribonucleotide
  modified_base 80: mod_base = OTHER; note = 2'-O-methyl ribonucleotide
  modified_base 81: mod_base = OTHER; note = 2'-O-methyl ribonucleotide
  modified_base 83: mod_base = OTHER; note = 2'-O-methyl ribonucleotide
  modified_base 84: mod_base = OTHER; note = 2'-O-methyl ribonucleotide
  modified_base 85: mod_base = OTHER; note = 2'-O-methyl ribonucleotide
  modified_base 86: mod_base = OTHER; note = 2'-O-methyl ribonucleotide
  modified_base 87: mod_base = OTHER; note = 2'-O-methyl ribonucleotide
  modified_base 88: mod_base = OTHER; note = 2'-O-methyl ribonucleotide
  modified_base 89: mod_base = OTHER; note = 2'-O-methyl ribonucleotide
  modified_base 90: mod_base = OTHER; note = 2'-O-methyl ribonucleotide
  modified_base 91: mod_base = OTHER; note = 2'-O-methyl ribonucleotide
  modified_base 92: mod_base = OTHER; note = 2'-O-methyl ribonucleotide
  modified_base 93: mod_base = OTHER; note = 2'-O-methyl ribonucleotide
  modified_base 94: mod_base = OTHER; note = 2'-O-methyl ribonucleotide
  modified_base 95: mod_base = OTHER; note = 2'-O-methyl ribonucleotide
  modified_base 96: mod_base = OTHER; note = 2'-O-methyl ribonucleotide
  modified_base 97: mod_base = OTHER; note = 2'-O-methyl ribonucleotide
  modified_base 98: mod_base = OTHER; note = 2'-O-methyl ribonucleotide
  modified_base 99: mod_base = OTHER; note = 2'-O-methyl ribonucleotide
  modified_base 100: mod_base = OTHER; note = nebularine
  modified_base 1..4: mod_base = OTHER; note = phosphorothioate linkage
  modified_base 97..100: mod_base = OTHER; note = phosphorothioate linkage
  misc_feature 1: note = RNA
  misc_feature 2: note = RNA
  misc_feature 3: note = RNA
  misc_feature 4: note = RNA
  misc_feature 5: note = RNA
  misc_feature 6: note = RNA
  misc_feature 7: note = RNA
  misc_feature 8: note = RNA
  misc_feature 9: note = RNA
  misc_feature 10: note = RNA
  misc_feature 11: note = RNA
  misc_feature 12: note = RNA
  misc_feature 13: note = RNA
  misc_feature 14: note = RNA
  misc_feature 15: note = RNA
  misc_feature 16: note = RNA
  misc_feature 17: note = RNA
  misc_feature 18: note = RNA
  misc_feature 19: note = RNA
  misc_feature 20: note = RNA
  misc_feature 21: note = RNA
  misc_feature 22: note = RNA
  misc_feature 23: note = RNA
  misc_feature 24: note = RNA
  misc_feature 25: note = RNA
  misc_feature 26: note = RNA
  misc_feature 27: note = RNA
  misc_feature 28: note = RNA
  misc_feature 29: note = RNA
  misc_feature 30: note = RNA
  misc_feature 31: note = RNA
  misc_feature 32: note = RNA
  misc_feature 33: note = RNA
  misc_feature 34: note = RNA
  misc_feature 35: note = RNA
  misc_feature 36: note = RNA
  misc_feature 37: note = RNA
  misc_feature 38: note = RNA
  misc_feature 39: note = RNA
  misc_feature 40: note = RNA
  misc_feature 41: note = RNA
  misc_feature 42: note = RNA
  misc_feature 43: note = RNA
  misc_feature 44: note = RNA
  misc_feature 45: note = RNA
  misc_feature 46: note = RNA
  misc_feature 47: note = RNA
  misc_feature 48: note = RNA
  misc_feature 49: note = RNA
  misc_feature 50: note = RNA
  misc_feature 51: note = RNA
  misc_feature 52: note = RNA
  misc_feature 53: note = RNA
  misc_feature 54: note = RNA
  misc_feature 55: note = RNA
  misc_feature 56: note = RNA
  misc_feature 57: note = RNA
  misc_feature 58: note = RNA
  misc_feature 59: note = RNA
  misc_feature 60: note = RNA
  misc_feature 61: note = RNA
  misc_feature 62: note = RNA
  misc_feature 63: note = RNA
  misc_feature 64: note = RNA
  misc_feature 65: note = RNA
  misc_feature 66: note = RNA
  misc_feature 67: note = RNA
  misc_feature 68: note = RNA
  misc_feature 69: note = RNA
  misc_feature 70: note = RNA
  misc_feature 71: note = RNA
  misc_feature 72: note = RNA
  misc_feature 73: note = RNA
  misc_feature 74: note = RNA
  misc_feature 75: note = RNA
  misc_feature 76: note = RNA
  misc_feature 77: note = RNA
  misc_feature 78: note = RNA
  misc_feature 79: note = RNA
  misc_feature 80: note = RNA
  misc_feature 81: note = RNA
  misc_feature 82: note = RNA
  misc_feature 83: note = RNA
  misc_feature 84: note = RNA
  misc_feature 85: note = RNA
  misc_feature 86: note = RNA
  misc_feature 87: note = RNA
  misc_feature 88: note = RNA
  misc_feature 89: note = RNA
  misc_feature 90: note = RNA
  misc_feature 91: note = RNA
  misc_feature 92: note = RNA
  misc_feature 93: note = RNA
  misc_feature 94: note = RNA
  misc_feature 95: note = RNA
  misc_feature 96: note = RNA
  misc_feature 97: note = RNA
  misc_feature 98: note = RNA
  misc_feature 99: note = RNA
  misc_feature 100: note = DNA

SEQ ID NO: 3154 - DNA, 103 bp, synthetic construct; identical to SEQ ID NO: 1797
  source 1..103: mol_type = other DNA
  modified_base 1: mod_base = OTHER; note = 2'-O-methyl ribonucleotide
  modified_base 2: mod_base = OTHER; note = 2'-O-methyl ribonucleotide
  modified_base 3: mod_base = OTHER; note = 2'-O-methyl ribonucleotide
  modified_base 21: mod_base = OTHER; note = 2'-O-methyl ribonucleotide
  modified_base 28: mod_base = OTHER; note = 2'-O-methyl ribonucleotide
  modified_base 29: mod_base = OTHER; note = 2'-O-methyl ribonucleotide
  modified_base 30: mod_base = OTHER; note = 2'-O-methyl ribonucleotide
  modified_base 31: mod_base = OTHER; note = 2'-O-methyl ribonucleotide
  modified_base 32: mod_base = OTHER; note = 2'-O-methyl ribonucleotide
  modified_base 34: mod_base = OTHER; note = 2'-O-methyl ribonucleotide
  modified_base 35: mod_base = OTHER; note = 2'-O-methyl ribonucleotide
  modified_base 36: mod_base = OTHER; note = 2'-O-methyl ribonucleotide
  modified_base 37: mod_base = OTHER; note = 2'-O-methyl ribonucleotide
  modified_base 38: mod_base = OTHER; note = 2'-O-methyl ribonucleotide
  modified_base 39: mod_base = OTHER; note = 2'-O-methyl ribonucleotide
  modified_base 40: mod_base = OTHER; note = 2'-O-methyl ribonucleotide
  modified_base 41: mod_base = OTHER; note = 2'-O-methyl ribonucleotide
  modified_base 42: mod_base = OTHER; note = 2'-O-methyl ribonucleotide
  modified_base 46: mod_base = OTHER; note = 2'-O-methyl ribonucleotide
  modified_base 48: mod_base = OTHER; note = 2'-O-methyl ribonucleotide
  modified_base 50: mod_base = OTHER; note = 2'-O-methyl ribonucleotide
  modified_base 52: mod_base = OTHER; note = 2'-O-methyl ribonucleotide
  modified_base 53: mod_base = OTHER; note = 2'-O-methyl ribonucleotide
  modified_base 54: mod_base = OTHER; note = 2'-O-methyl ribonucleotide
  modified_base 57: mod_base = OTHER; note = 2'-O-methyl ribonucleotide
  modified_base 61: mod_base = OTHER; note = 2'-O-methyl ribonucleotide
  modified_base 66: mod_base = OTHER; note = 2'-O-methyl ribonucleotide
  modified_base 67: mod_base = OTHER; note = 2'-O-methyl ribonucleotide
  modified_base 70: mod_base = OTHER; note = 2'-O-methyl ribonucleotide
  modified_base 71: mod_base = OTHER; note = 2'-O-methyl ribonucleotide
  modified_base 72: mod_base = OTHER; note = 2'-O-methyl ribonucleotide
  modified_base 74: mod_base = OTHER; note = 2'-O-methyl ribonucleotide
  modified_base 75: mod_base = OTHER; note = 2'-O-methyl ribonucleotide
  modified_base 76: mod_base = OTHER; note = 2'-O-methyl ribonucleotide
  modified_base 77: mod_base = OTHER; note = 2'-O-methyl ribonucleotide
  modified_base 78: mod_base = OTHER; note = 2'-O-methyl ribonucleotide
  modified_base 79: mod_base = OTHER; note = 2'-O-methyl ribonucleotide
  modified_base 80: mod_base = OTHER; note = 2'-O-methyl ribonucleotide
  modified_base 82: mod_base = OTHER; note = 2'-O-methyl ribonucleotide
  modified_base 83: mod_base = OTHER; note = 2'-O-methyl ribonucleotide
  modified_base 84: mod_base = OTHER; note = 2'-O-methyl ribonucleotide
  modified_base 85: mod_base = OTHER; note = 2'-O-methyl ribonucleotide
  modified_base 86: mod_base = OTHER; note = 2'-O-methyl ribonucleotide
  modified_base 87: mod_base = OTHER; note = 2'-O-methyl ribonucleotide
  modified_base 89: mod_base = OTHER; note = 2'-O-methyl ribonucleotide
  modified_base 92: mod_base = OTHER; note = 2'-O-methyl ribonucleotide
  modified_base 93: mod_base = OTHER; note = 2'-O-methyl ribonucleotide
  modified_base 94: mod_base = OTHER; note = 2'-O-methyl ribonucleotide
  modified_base 95: mod_base = OTHER; note = 2'-O-methyl ribonucleotide
  modified_base 96: mod_base = OTHER; note = 2'-O-methyl ribonucleotide
  modified_base 97: mod_base = OTHER; note = 2'-O-methyl ribonucleotide
  modified_base 98: mod_base = OTHER; note = 2'-O-methyl ribonucleotide
  modified_base 99: mod_base = OTHER; note = 2'-O-methyl ribonucleotide
  modified_base 100: mod_base = OTHER; note = 2'-O-methyl ribonucleotide
  modified_base 101: mod_base = OTHER; note = nebularine
  modified_base 102: mod_base = OTHER; note = nebularine
  modified_base 103: mod_base = OTHER; note = nebularine
  modified_base 1..4: mod_base = OTHER; note = phosphorothioate linkage
  modified_base 97..100: mod_base = OTHER; note = phosphorothioate linkage
  misc_feature 1: note = RNA
  misc_feature 2: note = RNA
  misc_feature 3: note = RNA
  misc_feature 4: note = RNA
  misc_feature 5: note = RNA
  misc_feature 6: note = RNA
  misc_feature 7: note = RNA
  misc_feature 8: note = RNA
  misc_feature 9: note = RNA
  misc_feature 10: note = RNA
  misc_feature 11: note = RNA
  misc_feature 12: note = RNA
  misc_feature 13: note = RNA
  misc_feature 14: note = RNA
  misc_feature 15: note = RNA
  misc_feature 16: note = RNA
  misc_feature 17: note = RNA
  misc_feature 18: note = RNA
  misc_feature 19: note = RNA
  misc_feature 20: note = RNA
  misc_feature 21: note = RNA
  misc_feature 22: note = RNA
  misc_feature 23: note = RNA
  misc_feature 24: note = RNA
  misc_feature 25: note = RNA
  misc_feature 26: note = RNA
  misc_feature 27: note = RNA
  misc_feature 28: note = RNA
  misc_feature 29: note = RNA
  misc_feature 30: note = RNA
  misc_feature 31: note = RNA
  misc_feature 32: note = RNA
  misc_feature 33: note = RNA
  misc_feature 34: note = RNA
  misc_feature 35: note = RNA
  misc_feature 36: note = RNA
  misc_feature 37: note = RNA
  misc_feature 38: note = RNA
  misc_feature 39: note = RNA
  misc_feature 40: note = RNA
  misc_feature 41: note = RNA
  misc_feature 42: note = RNA
  misc_feature 43: note = RNA
  misc_feature 44: note = RNA
  misc_feature 45: note = RNA
  misc_feature 46: note = RNA
  misc_feature 47: note = RNA
  misc_feature 48: note = RNA
  misc_feature 49: note = RNA
  misc_feature 50: note = RNA
  misc_feature 51: note = RNA
  misc_feature 52: note = RNA
  misc_feature 53: note = RNA
  misc_feature 54: note = RNA
  misc_feature 55: note = RNA
  misc_feature 56: note = RNA
  misc_feature 57: note = RNA
  misc_feature 58: note = RNA
  misc_feature 59: note = RNA
  misc_feature 60: note = RNA
  misc_feature 61: note = RNA
  misc_feature 62: note = RNA
  misc_feature 63: note = RNA
  misc_feature 64: note = RNA
  misc_feature 65: note = RNA
  misc_feature 66: note = RNA
  misc_feature 67: note = RNA
  misc_feature 68: note = RNA
  misc_feature 69: note = RNA
  misc_feature 70: note = RNA
  misc_feature 71: note = RNA
  misc_feature 72: note = RNA
  misc_feature 73: note = RNA
  misc_feature 74: note = RNA
  misc_feature 75: note = RNA
  misc_feature 76: note = RNA
  misc_feature 77: note = RNA
  misc_feature 78: note = RNA
  misc_feature 79: note = RNA
  misc_feature 80: note = RNA
  misc_feature 81: note = RNA
  misc_feature 82: note = RNA
  misc_feature 83: note = RNA
  misc_feature 84: note = RNA
  misc_feature 85: note = RNA
  misc_feature 86: note = RNA
  misc_feature 87: note = RNA
  misc_feature 88: note = RNA
  misc_feature 89: note = RNA
  misc_feature 90: note = RNA
  misc_feature 91: note = RNA
  misc_feature 92: note = RNA
  misc_feature 93: note = RNA
  misc_feature 94: note = RNA
  misc_feature 95: note = RNA
  misc_feature 96: note = RNA
  misc_feature 97: note = RNA
  misc_feature 98: note = RNA
  misc_feature 99: note = RNA
  misc_feature 100: note = RNA
  misc_feature 101: note = DNA
  misc_feature 102: note = DNA
  misc_feature 103: note = DNA

SEQ ID NO: 3155 - DNA, 103 bp, synthetic construct; identical to SEQ ID NO: 1797
  source 1..103: mol_type = other DNA
  modified_base 1: mod_base = OTHER; note = 2'-O-methyl ribonucleotide
  modified_base 2: mod_base = OTHER; note = 2'-O-methyl ribonucleotide
  modified_base 3: mod_base = OTHER; note = 2'-O-methyl ribonucleotide
  modified_base 21: mod_base = OTHER; note = 2'-O-methyl ribonucleotide
  modified_base 28: mod_base = OTHER; note = 2'-O-methyl ribonucleotide
  modified_base 29: mod_base = OTHER; note = 2'-O-methyl ribonucleotide
  modified_base 30: mod_base = OTHER; note = 2'-O-methyl ribonucleotide
  modified_base 31: mod_base = OTHER; note = 2'-O-methyl ribonucleotide
  modified_base 32: mod_base = OTHER; note = 2'-O-methyl ribonucleotide
  modified_base 33: mod_base = OTHER; note = 2'-O-methyl ribonucleotide
  modified_base 34: mod_base = OTHER; note = 2'-O-methyl ribonucleotide
  modified_base 35: mod_base = OTHER; note = 2'-O-methyl ribonucleotide
  modified_base 36: mod_base = OTHER; note = 2'-O-methyl ribonucleotide
  modified_base 37: mod_base = OTHER; note = 2'-O-methyl ribonucleotide
  modified_base 38: mod_base = OTHER; note = 2'-O-methyl ribonucleotide
  modified_base 39: mod_base = OTHER; note = 2'-O-methyl ribonucleotide
  modified_base 40: mod_base = OTHER; note = 2'-O-methyl ribonucleotide
  modified_base 41: mod_base = OTHER; note = 2'-O-methyl ribonucleotide
  modified_base 42: mod_base = OTHER; note = 2'-O-methyl ribonucleotide
  modified_base 46: mod_base = OTHER; note = 2'-O-methyl ribonucleotide
  modified_base 48: mod_base = OTHER; note = 2'-O-methyl ribonucleotide
  modified_base 50: mod_base = OTHER; note = 2'-O-methyl ribonucleotide
  modified_base 52: mod_base = OTHER; note = 2'-O-methyl ribonucleotide
  modified_base 53: mod_base = OTHER; note = 2'-O-methyl ribonucleotide
  modified_base 54: mod_base = OTHER; note = 2'-O-methyl ribonucleotide
  modified_base 55: mod_base = OTHER; note = 2'-O-methyl ribonucleotide
  modified_base 56: mod_base = OTHER; note = 2'-O-methyl ribonucleotide
  modified_base 57: mod_base = OTHER; note = 2'-O-methyl ribonucleotide
  modified_base 60: mod_base = OTHER; note = 2'-O-methyl ribonucleotide
  modified_base 61: mod_base = OTHER; note = 2'-O-methyl ribonucleotide
  modified_base 66: mod_base = OTHER; note = 2'-O-methyl ribonucleotide
  modified_base 67: mod_base = OTHER; note = 2'-O-methyl ribonucleotide
  modified_base 70: mod_base = OTHER; note = 2'-O-methyl ribonucleotide
  modified_base 71: mod_base = OTHER; note = 2'-O-methyl ribonucleotide
  modified_base 72: mod_base = OTHER; note = 2'-O-methyl ribonucleotide
  modified_base 73: mod_base = OTHER; note = 2'-O-methyl ribonucleotide
  modified_base 74: mod_base = OTHER; note = 2'-O-methyl ribonucleotide
  modified_base 75: mod_base = OTHER; note = 2'-O-methyl ribonucleotide
  modified_base 76: mod_base = OTHER; note = 2'-O-methyl ribonucleotide
  modified_base 77: mod_base = OTHER; note = 2'-O-methyl ribonucleotide
  modified_base 78: mod_base = OTHER; note = 2'-O-methyl ribonucleotide
  modified_base 79: mod_base = OTHER; note = 2'-O-methyl ribonucleotide
  modified_base 80: mod_base = OTHER; note = 2'-O-methyl ribonucleotide
  modified_base 81: mod_base = OTHER; note = 2'-O-methyl ribonucleotide
  modified_base 83: mod_base = OTHER; note = 2'-O-methyl ribonucleotide
  modified_base 84: mod_base = OTHER; note = 2'-O-methyl ribonucleotide
  modified_base 85: mod_base = OTHER; note = 2'-O-methyl ribonucleotide
  modified_base 86: mod_base = OTHER; note = 2'-O-methyl ribonucleotide
  modified_base 87: mod_base = OTHER; note = 2'-O-methyl ribonucleotide
  modified_base 88: mod_base = OTHER; note = 2'-O-methyl ribonucleotide
  modified_base 89: mod_base = OTHER; note = 2'-O-methyl ribonucleotide
  modified_base 90: mod_base = OTHER; note = 2'-O-methyl ribonucleotide
  modified_base 91: mod_base = OTHER; note = 2'-O-methyl ribonucleotide
  modified_base 92: mod_base = OTHER; note = 2'-O-methyl ribonucleotide
  modified_base 93: mod_base = OTHER; note = 2'-O-methyl ribonucleotide
  modified_base 94: mod_base = OTHER; note = 2'-O-methyl ribonucleotide
  modified_base 95: mod_base = OTHER; note = 2'-O-methyl ribonucleotide
  modified_base 96: mod_base = OTHER; note = 2'-O-methyl ribonucleotide
  modified_base 97: mod_base = OTHER; note = 2'-O-methyl ribonucleotide
  modified_base 98: mod_base = OTHER; note = 2'-O-methyl ribonucleotide
  modified_base 99: mod_base = OTHER; note = 2'-O-methyl ribonucleotide
  modified_base 100: mod_base = OTHER; note = 2'-O-methyl ribonucleotide
  modified_base 101: mod_base = OTHER; note = nebularine
  modified_base 102: mod_base = OTHER; note = nebularine
  modified_base 103: mod_base = OTHER; note = nebularine
  modified_base 1..4: mod_base = OTHER; note = phosphorothioate linkage
  modified_base 97..100: mod_base = OTHER; note = phosphorothioate linkage
  misc_feature 1: note = RNA
  misc_feature 2: note = RNA
  misc_feature 3: note = RNA
  misc_feature 4: note = RNA
  misc_feature 5: note = RNA
  misc_feature 6: note = RNA
  misc_feature 7: note = RNA
  misc_feature 8: note = RNA
  misc_feature 9: note = RNA
  misc_feature 10: note = RNA
  misc_feature 11: note = RNA
  misc_feature 12: note = RNA
  misc_feature 13: note = RNA
  misc_feature 14: note = RNA
  misc_feature 15: note = RNA
  misc_feature 16: note = RNA
  misc_feature 17: note = RNA
  misc_feature 18: note = RNA
  misc_feature 19: note = RNA
  misc_feature 20: note = RNA
  misc_feature 21: note = RNA
  misc_feature 22: note = RNA
  misc_feature 23: note = RNA
  misc_feature 24: note = RNA
  misc_feature 25: note = RNA
  misc_feature 26: note = RNA
  misc_feature 27: note = RNA
  misc_feature 28: note = RNA
  misc_feature 29: note = RNA
  misc_feature 30: note = RNA
  misc_feature 31: note = RNA
  misc_feature 32: note = RNA
  misc_feature 33: note = RNA
  misc_feature 34: note = RNA
  misc_feature 35: note = RNA
  misc_feature 36: note = RNA
  misc_feature 37: note = RNA
  misc_feature 38: note = RNA
  misc_feature 39: note = RNA
  misc_feature 40: note = RNA
  misc_feature 41: note = RNA
  misc_feature 42: note = RNA
  misc_feature 43: note = RNA
  misc_feature 44: note = RNA
  misc_feature 45: note = RNA
  misc_feature 46: note = RNA
  misc_feature 47: note = RNA
  misc_feature 48: note = RNA
  misc_feature 49: note = RNA
  misc_feature 50: note = RNA
  misc_feature 51: note = RNA
  misc_feature 52: note = RNA
  misc_feature 53: note = RNA
  misc_feature 54: note = RNA
  misc_feature 55: note = RNA
  misc_feature 56: note = RNA
  misc_feature 57: note = RNA
  misc_feature 58: note = RNA
  misc_feature 59: note = RNA
  misc_feature 60: note = RNA
  misc_feature 61: note = RNA
  misc_feature 62: note = RNA
  misc_feature 63: note = RNA
  misc_feature 64: note = RNA
  misc_feature 65: note = RNA
  misc_feature 66: note = RNA
  misc_feature 67: note = RNA
  misc_feature 68: note = RNA
  misc_feature 69: note = RNA
  misc_feature 70: note = RNA
  misc_feature 71: note = RNA
  misc_feature 72: note = RNA
  misc_feature 73: note = RNA
  misc_feature 74: note = RNA
  misc_feature 75: note = RNA
  misc_feature 76: note = RNA
  misc_feature 77: note = RNA
  misc_feature 78: note = RNA
  misc_feature 79: note = RNA
  misc_feature 80: note = RNA
  misc_feature 81: note = RNA
  misc_feature 82: note = RNA
  misc_feature 83: note = RNA
  misc_feature 84: note = RNA
  misc_feature 85: note = RNA
  misc_feature 86: note = RNA
  misc_feature 87: note = RNA
  misc_feature 88: note = RNA
  misc_feature 89: note = RNA
  misc_feature 90: note = RNA
  misc_feature 91: note = RNA
  misc_feature 92: note = RNA
  misc_feature 93: note = RNA
  misc_feature 94: note = RNA
  misc_feature 95: note = RNA
  misc_feature 96: note = RNA
  misc_feature 97: note = RNA
  misc_feature 98: note = RNA
  misc_feature 99: note = RNA
  misc_feature 100: note = RNA
  misc_feature 101: note = DNA
  misc_feature 102: note = DNA
  misc_feature 103: note = DNA

SEQ ID NO: 3156 - RNA, 100 nt, synthetic construct; identical to SEQ ID NO: 287
  source 1..100: mol_type = other RNA
  modified_base 1: mod_base = OTHER; note = 2'-O-methyl ribonucleotide
  modified_base 2: mod_base = OTHER; note = 2'-O-methyl ribonucleotide
  modified_base 3: mod_base = OTHER; note = 2'-O-methyl ribonucleotide
  modified_base 6: mod_base = OTHER; note = 2'-O-methyl ribonucleotide
  modified_base 16: mod_base = OTHER; note = 2'-O-methyl ribonucleotide
  modified_base 21: mod_base = OTHER; note = 2'-O-methyl ribonucleotide
  modified_base 28: mod_base = OTHER; note = 2'-O-methyl ribonucleotide
  modified_base 29: mod_base = OTHER; note = 2'-O-methyl ribonucleotide
  modified_base 30: mod_base = OTHER; note = 2'-O-methyl ribonucleotide
  modified_base 31: mod_base = OTHER; note = 2'-O-methyl ribonucleotide
  modified_base 32: mod_base = OTHER; note = 2'-O-methyl ribonucleotide
  modified_base 33: mod_base = OTHER; note = 2'-O-methyl ribonucleotide
  modified_base 34: mod_base = OTHER; note = 2'-O-methyl ribonucleotide
  modified_base 35: mod_base = OTHER; note = 2'-O-methyl ribonucleotide
  modified_base 36: mod_base = OTHER; note = 2'-O-methyl ribonucleotide
  modified_base 37: mod_base = OTHER; note = 2'-O-methyl ribonucleotide
  modified_base 38: mod_base = OTHER; note = 2'-O-methyl ribonucleotide
  modified_base 39: mod_base = OTHER; note = 2'-O-methyl ribonucleotide
  modified_base 40: mod_base = OTHER; note = 2'-O-methyl ribonucleotide
  modified_base 41: mod_base = OTHER; note = 2'-O-methyl ribonucleotide
  modified_base 42: mod_base = OTHER; note = 2'-O-methyl ribonucleotide
  modified_base 46: mod_base = OTHER; note = 2'-O-methyl ribonucleotide
  modified_base 48: mod_base = OTHER; note = 2'-O-methyl ribonucleotide
  modified_base 50: mod_base = OTHER; note = 2'-O-methyl ribonucleotide
  modified_base 52: mod_base = OTHER; note = 2'-O-methyl ribonucleotide
  modified_base 53: mod_base = OTHER; note = 2'-O-methyl ribonucleotide
  modified_base 54: mod_base = OTHER; note = 2'-O-methyl ribonucleotide
  modified_base 55: mod_base = OTHER; note = 2'-O-methyl ribonucleotide
  modified_base 56: mod_base = OTHER; note = 2'-O-methyl ribonucleotide
  modified_base 57: mod_base = OTHER; note = 2'-O-methyl ribonucleotide
  modified_base 60: mod_base = OTHER; note = 2'-O-methyl ribonucleotide
  modified_base 61: mod_base = OTHER; note = 2'-O-methyl ribonucleotide
  modified_base 66: mod_base = OTHER; note = 2'-O-methyl ribonucleotide
  modified_base 67: mod_base = OTHER; note = 2'-O-methyl ribonucleotide
  modified_base 70: mod_base = OTHER; note = 2'-O-methyl ribonucleotide
  modified_base 71: mod_base = OTHER; note = 2'-O-methyl ribonucleotide
  modified_base 72: mod_base = OTHER; note = 2'-O-methyl ribonucleotide
  modified_base 73: mod_base = OTHER; note = 2'-O-methyl ribonucleotide
  modified_base 74: mod_base = OTHER; note = 2'-O-methyl ribonucleotide
  modified_base 75: mod_base = OTHER; note = 2'-O-methyl ribonucleotide
  modified_base 76: mod_base = OTHER; note = 2'-O-methyl ribonucleotide
  modified_base 77: mod_base = OTHER; note = 2'-O-methyl ribonucleotide
  modified_base 78: mod_base = OTHER; note = 2'-O-methyl ribonucleotide
  modified_base 79: mod_base = OTHER; note = 2'-O-methyl ribonucleotide
  modified_base 80: mod_base = OTHER; note = 2'-O-methyl ribonucleotide
  modified_base 81: mod_base = OTHER; note = 2'-O-methyl ribonucleotide
  modified_base 83: mod_base = OTHER; note = 2'-O-methyl ribonucleotide
  modified_base 84: mod_base = OTHER; note = 2'-O-methyl ribonucleotide
  modified_base 85: mod_base = OTHER; note = 2'-O-methyl ribonucleotide
  modified_base 86: mod_base = OTHER; note = 2'-O-methyl ribonucleotide
  modified_base 87: mod_base = OTHER; note = 2'-O-methyl ribonucleotide
  modified_base 88: mod_base = OTHER; note = 2'-O-methyl ribonucleotide
  modified_base 89: mod_base = OTHER; note = 2'-O-methyl ribonucleotide
  modified_base 90: mod_base = OTHER; note = 2'-O-methyl ribonucleotide
  modified_base 91: mod_base = OTHER; note = 2'-O-methyl ribonucleotide
  modified_base 92: mod_base = OTHER; note = 2'-O-methyl ribonucleotide
  modified_base 93: mod_base = OTHER; note = 2'-O-methyl ribonucleotide
  modified_base 94: mod_base = OTHER; note = 2'-O-methyl ribonucleotide
  modified_base 95: mod_base = OTHER; note = 2'-O-methyl ribonucleotide
  modified_base 96: mod_base = OTHER; note = 2'-O-methyl ribonucleotide
  modified_base 97: mod_base = OTHER; note = 2'-O-methyl ribonucleotide
  modified_base 98: mod_base = OTHER; note = 2'-O-methyl ribonucleotide
  modified_base 99: mod_base = OTHER; note = 2'-O-methyl ribonucleotide
  modified_base 100: mod_base = OTHER; note = 2'-O-methyl ribonucleotide
  modified_base 1..4: mod_base = OTHER; note = phosphorothioate linkage
  modified_base 45..46: mod_base = OTHER; note = phosphorothioate linkage
  modified_base 64..65: mod_base = OTHER; note = phosphorothioate linkage
  modified_base 97..100: mod_base = OTHER; note = phosphorothioate linkage

SEQ ID NO: 3157 - DNA, 33 bp, synthetic construct
  source 1..33: mol_type = other DNA
acactctttccctacacgacgctcttccgatct

SEQ ID NO: 3158 - DNA, 34 bp, synthetic construct
  source 1..34: mol_type = other DNA
gtgactggagttcagacgtgtgctcttccgatct

SEQ ID NO: 3159 - protein, 9 aa, unidentified
  source 1..9: note = PCSK9 sequence
SSVFAQSIP

SEQ ID NO: 3160 - RNA, 100 nt, synthetic construct
  source 1..100: mol_type = other RNA
nnnnnnnnnnnnnnnnnnnngttttagagctagaaatagcaagttaaaataaggctagtccgttatcaacttgaaaaagtggcaccgagtcggtgctttt

SEQ ID NO: 3161 - RNA, 100 nt, synthetic construct; identical to SEQ ID NO: 55
  source 1..100: mol_type = other RNA
  modified_base 1: mod_base = OTHER; note = 2'-O-methyl ribonucleotide
  modified_base 2: mod_base = OTHER; note = 2'-O-methyl ribonucleotide
  modified_base 3: mod_base = OTHER; note = 2'-O-methyl ribonucleotide
  modified_base 6: mod_base = OTHER; note = 2'-O-methyl ribonucleotide
  modified_base 9: mod_base = OTHER; note = 2'-O-methyl ribonucleotide
  modified_base 13: mod_base = OTHER; note = 2'-O-methyl ribonucleotide
  modified_base 20: mod_base = OTHER; note = 2'-O-methyl ribonucleotide
  modified_base 21: mod_base = OTHER; note = 2'-O-methyl ribonucleotide
  modified_base 28: mod_base = OTHER; note = 2'-O-methyl ribonucleotide
  modified_base 29: mod_base = OTHER; note = 2'-O-methyl ribonucleotide
  modified_base 30: mod_base = OTHER; note = 2'-O-methyl ribonucleotide
  modified_base 31: mod_base = OTHER; note = 2'-O-methyl ribonucleotide
  modified_base 32: mod_base = OTHER; note = 2'-O-methyl ribonucleotide
  modified_base 34: mod_base = OTHER; note = 2'-O-methyl ribonucleotide
  modified_base 35: mod_base = OTHER; note = 2'-O-methyl ribonucleotide
  modified_base 36: mod_base = OTHER; note = 2'-O-methyl ribonucleotide
  modified_base 37: mod_base = OTHER; note = 2'-O-methyl ribonucleotide
  modified_base 38: mod_base = OTHER; note = 2'-O-methyl ribonucleotide
  modified_base 39: mod_base = OTHER; note = 2'-O-methyl ribonucleotide
  modified_base 40: mod_base = OTHER; note = 2'-O-methyl ribonucleotide
  modified_base 41: mod_base = OTHER; note = 2'-O-methyl ribonucleotide
  modified_base 42: mod_base = OTHER; note = 2'-O-methyl ribonucleotide
  modified_base 46: mod_base = OTHER; note = 2'-O-methyl ribonucleotide
  modified_base 48: mod_base = OTHER; note = 2'-O-methyl ribonucleotide
  modified_base 50: mod_base = OTHER; note = 2'-O-methyl ribonucleotide
  modified_base 52: mod_base = OTHER; note = 2'-O-methyl ribonucleotide
  modified_base 53: mod_base = OTHER; note = 2'-O-methyl ribonucleotide
  modified_base 54: mod_base = OTHER; note = 2'-O-methyl ribonucleotide
  modified_base 57: mod_base = OTHER; note = 2'-O-methyl ribonucleotide
  modified_base 61: mod_base = OTHER; note = 2'-O-methyl ribonucleotide
  modified_base 66: mod_base = OTHER; note = 2'-O-methyl ribonucleotide
  modified_base 67: mod_base = OTHER; note = 2'-O-methyl ribonucleotide
  modified_base 70: mod_base = OTHER; note = 2'-O-methyl ribonucleotide
  modified_base 71: mod_base = OTHER; note = 2'-O-methyl ribonucleotide
  modified_base 72: mod_base = OTHER; note = 2'-O-methyl ribonucleotide
  modified_base 74: mod_base = OTHER; note = 2'-O-methyl ribonucleotide
  modified_base 75: mod_base = OTHER; note = 2'-O-methyl ribonucleotide
  modified_base 76: mod_base = OTHER; note = 2'-O-methyl ribonucleotide
  modified_base 77: mod_base = OTHER; note = 2'-O-methyl ribonucleotide
  modified_base 78: mod_base = OTHER; note = 2'-O-methyl ribonucleotide
  modified_base 79: mod_base = OTHER; note = 2'-O-methyl ribonucleotide
  modified_base 80: mod_base = OTHER; note = 2'-O-methyl ribonucleotide
  modified_base 82: mod_base = OTHER; note = 2'-O-methyl ribonucleotide
  modified_base 83: mod_base = OTHER; note = 2'-O-methyl ribonucleotide
  modified_base 84: mod_base = OTHER; note = 2'-O-methyl ribonucleotide
  modified_base 85: mod_base = OTHER; note = 2'-O-methyl ribonucleotide
  modified_base 86: mod_base = OTHER; note = 2'-O-methyl ribonucleotide
  modified_base 87: mod_base = OTHER; note = 2'-O-methyl ribonucleotide
  modified_base 89: mod_base = OTHER; note = 2'-O-methyl ribonucleotide
  modified_base 92: mod_base = OTHER; note = 2'-O-methyl ribonucleotide
  modified_base 93: mod_base = OTHER; note = 2'-O-methyl ribonucleotide
  modified_base 94: mod_base = OTHER; note = 2'-O-methyl ribonucleotide
  modified_base 95: mod_base = OTHER; note = 2'-O-methyl ribonucleotide
  modified_base 96: mod_base = OTHER; note = 2'-O-methyl ribonucleotide
  modified_base 97: mod_base = OTHER; note = 2'-O-methyl ribonucleotide
  modified_base 98: mod_base = OTHER; note = 2'-O-methyl ribonucleotide
  modified_base 99: mod_base = OTHER; note = 2'-O-methyl ribonucleotide
  modified_base 100: mod_base = OTHER; note = 2'-O-methyl ribonucleotide
  modified_base 1..4: mod_base = OTHER; note = phosphorothioate linkage
  modified_base 97..100: mod_base = OTHER; note = phosphorothioate linkage

SEQ ID NO: 3162 - RNA, 100 nt, synthetic construct; identical to SEQ ID NO: 55
  source 1..100: mol_type = other RNA
  modified_base 1: mod_base = OTHER; note = 2'-O-methyl ribonucleotide
  modified_base 2: mod_base = OTHER; note = 2'-O-methyl ribonucleotide
  modified_base 3: mod_base = OTHER; note = 2'-O-methyl ribonucleotide
  modified_base 21: mod_base = OTHER; note = 2'-O-methyl ribonucleotide
  modified_base 28: mod_base = OTHER; note = 2'-O-methyl ribonucleotide
  modified_base 29: mod_base = OTHER; note = 2'-O-methyl ribonucleotide
  modified_base 30: mod_base = OTHER; note = 2'-O-methyl ribonucleotide
  modified_base 31: mod_base = OTHER; note = 2'-O-methyl ribonucleotide
  modified_base 32: mod_base = OTHER; note = 2'-O-methyl ribonucleotide
  modified_base 34: mod_base = OTHER; note = 2'-O-methyl ribonucleotide
  modified_base 35: mod_base = OTHER; note = 2'-O-methyl ribonucleotide
  modified_base 36: mod_base = OTHER; note = 2'-O-methyl ribonucleotide
  modified_base 37: mod_base = OTHER; note = 2'-O-methyl ribonucleotide
  modified_base 38: mod_base = OTHER; note = 2'-O-methyl ribonucleotide
  modified_base 39: mod_base = OTHER; note = 2'-O-methyl ribonucleotide
  modified_base 40: mod_base = OTHER; note = 2'-O-methyl ribonucleotide
  modified_base 41: mod_base = OTHER; note = 2'-O-methyl ribonucleotide
  modified_base 42: mod_base = OTHER; note = 2'-O-methyl ribonucleotide
  modified_base 46: mod_base = OTHER; note = 2'-O-methyl ribonucleotide
  modified_base 48: mod_base = OTHER; note = 2'-O-methyl ribonucleotide
  modified_base 50: mod_base = OTHER; note = 2'-O-methyl ribonucleotide
  modified_base 52: mod_base = OTHER; note = 2'-O-methyl ribonucleotide
  modified_base 53: mod_base = OTHER; note = 2'-O-methyl ribonucleotide
  modified_base 54: mod_base = OTHER; note = 2'-O-methyl ribonucleotide
  modified_base 55: mod_base = OTHER; note = 2'-O-methyl ribonucleotide
  modified_base 56: mod_base = OTHER; note = 2'-O-methyl ribonucleotide
  modified_base 57: mod_base = OTHER; note = 2'-O-methyl ribonucleotide
  modified_base 60: mod_base = OTHER; note = 2'-O-methyl ribonucleotide
  modified_base 61: mod_base = OTHER; note = 2'-O-methyl ribonucleotide
  modified_base 66: mod_base = OTHER; note = 2'-O-methyl ribonucleotide
  modified_base 67: mod_base = OTHER; note = 2'-O-methyl ribonucleotide
  modified_base 70: mod_base = OTHER; note = 2'-O-methyl ribonucleotide
  modified_base 71: mod_base = OTHER; note = 2'-O-methyl ribonucleotide
  modified_base 72: mod_base = OTHER; note = 2'-O-methyl ribonucleotide
  modified_base 74: mod_base = OTHER; note = 2'-O-methyl ribonucleotide
  modified_base 75: mod_base = OTHER; note = 2'-O-methyl ribonucleotide
  modified_base 76: mod_base = OTHER; note = 2'-O-methyl ribonucleotide
  modified_base 77: mod_base = OTHER; note = 2'-O-methyl ribonucleotide
  modified_base 78: mod_base = OTHER; note = 2'-O-methyl ribonucleotide
  modified_base 79: mod_base = OTHER; note = 2'-O-methyl ribonucleotide
  modified_base 80: mod_base = OTHER; note = 2'-O-methyl ribonucleotide
  modified_base 81: mod_base = OTHER; note = 2'-O-methyl ribonucleotide
  modified_base 83: mod_base = OTHER; note = 2'-O-methyl ribonucleotide
  modified_base 84: mod_base = OTHER; note = 2'-O-methyl ribonucleotide
  modified_base 85: mod_base = OTHER; note = 2'-O-methyl ribonucleotide
  modified_base 86: mod_base = OTHER; note = 2'-O-methyl ribonucleotide
  modified_base 87: mod_base = OTHER; note = 2'-O-methyl ribonucleotide
  modified_base 88: mod_base = OTHER; note = 2'-O-methyl ribonucleotide
  modified_base 89: mod_base = OTHER; note = 2'-O-methyl ribonucleotide
  modified_base 90: mod_base = OTHER; note = 2'-O-methyl ribonucleotide
  modified_base 91: mod_base = OTHER; note = 2'-O-methyl ribonucleotide
  modified_base 92: mod_base = OTHER; note = 2'-O-methyl ribonucleotide
  modified_base 93: mod_base = OTHER; note = 2'-O-methyl ribonucleotide
  modified_base 94: mod_base = OTHER; note = 2'-O-methyl ribonucleotide
  modified_base 95: mod_base = OTHER; note = 2'-O-methyl ribonucleotide
  modified_base 96: mod_base = OTHER; note = 2'-O-methyl ribonucleotide
  modified_base 97: mod_base = OTHER; note = 2'-O-methyl ribonucleotide
  modified_base 98: mod_base = OTHER; note = 2'-O-methyl ribonucleotide
  modified_base 99: mod_base = OTHER; note = 2'-O-methyl ribonucleotide
  modified_base 100: mod_base = OTHER; note = 2'-O-methyl ribonucleotide
  modified_base 1..4: mod_base = OTHER; note = phosphorothioate linkage
  modified_base 97..100: mod_base = OTHER; note = phosphorothioate linkage

SEQ ID NO: 3163 - RNA, 80 nt, synthetic construct; identical to SEQ ID NO: 57
  source 1..80: mol_type = other RNA
  modified_base 9: mod_base = OTHER; note = 2'-O-methyl ribonucleotide
  modified_base 10: mod_base = OTHER; note = 2'-O-methyl ribonucleotide
  modified_base 11: mod_base = OTHER; note = 2'-O-methyl ribonucleotide
  modified_base 12: mod_base = OTHER; note = 2'-O-methyl ribonucleotide
  modified_base 13: mod_base = OTHER; note = 2'-O-methyl ribonucleotide
  modified_base 14: mod_base = OTHER; note = 2'-O-methyl ribonucleotide
  modified_base 15: mod_base = OTHER; note = 2'-O-methyl ribonucleotide
  modified_base 16: mod_base = OTHER; note = 2'-O-methyl ribonucleotide
  modified_base 17: mod_base = OTHER; note = 2'-O-methyl ribonucleotide
  modified_base 18: mod_base = OTHER; note = 2'-O-methyl ribonucleotide
  modified_base 19: mod_base = OTHER; note = 2'-O-methyl ribonucleotide
  modified_base 20: mod_base = OTHER; note = 2'-O-methyl ribonucleotide
  modified_base 49: mod_base = OTHER; note = 2'-O-methyl ribonucleotide
  modified_base 50: mod_base = OTHER; note = 2'-O-methyl ribonucleotide
  modified_base 51: mod_base = OTHER; note = 2'-O-methyl ribonucleotide
  modified_base 52: mod_base = OTHER; note = 2'-O-methyl ribonucleotide
  modified_base 53: mod_base = OTHER; note = 2'-O-methyl ribonucleotide
  modified_base 54: mod_base = OTHER; note = 2'-O-methyl ribonucleotide
  modified_base 55: mod_base = OTHER; note = 2'-O-methyl ribonucleotide
  modified_base 56: mod_base = OTHER; note = 2'-O-methyl ribonucleotide
  modified_base 57: mod_base = OTHER; note = 2'-O-methyl ribonucleotide
  modified_base 58: mod_base = OTHER; note = 2'-O-methyl ribonucleotide
  modified_base 59: mod_base = OTHER; note = 2'-O-methyl ribonucleotide
  modified_base 60: mod_base = OTHER; note = 2'-O-methyl ribonucleotide
  modified_base 61: mod_base = OTHER; note = 2'-O-methyl ribonucleotide
  modified_base 62: mod_base = OTHER; note = 2'-O-methyl ribonucleotide
  modified_base 63: mod_base = OTHER; note = 2'-O-methyl ribonucleotide
  modified_base 64: mod_base = OTHER; note = 2'-O-methyl ribonucleotide
  modified_base 65: mod_base = OTHER; note = 2'-O-methyl ribonucleotide
  modified_base 66: mod_base = OTHER; note = 2'-O-methyl ribonucleotide
  modified_base 67: mod_base = OTHER; note = 2'-O-methyl ribonucleotide
  modified_base 68: mod_base = OTHER; note = 2'-O-methyl ribonucleotide
  modified_base 69: mod_base = OTHER; note = 2'-O-methyl ribonucleotide
  modified_base 70: mod_base = OTHER; note = 2'-O-methyl ribonucleotide
  modified_base 71: mod_base = OTHER; note = 2'-O-methyl ribonucleotide
  modified_base 72: mod_base = OTHER; note = 2'-O-methyl ribonucleotide
  modified_base 73: mod_base = OTHER; note = 2'-O-methyl ribonucleotide
  modified_base 74: mod_base = OTHER; note = 2'-O-methyl ribonucleotide
  modified_base 75: mod_base = OTHER; note = 2'-O-methyl ribonucleotide
  modified_base 76: mod_base = OTHER; note = 2'-O-methyl ribonucleotide
  modified_base 77: mod_base = OTHER; note = 2'-O-methyl ribonucleotide
  modified_base 78: mod_base = OTHER; note = 2'-O-methyl ribonucleotide
  modified_base 79: mod_base = OTHER; note = 2'-O-methyl ribonucleotide
  modified_base 80: mod_base = OTHER; note = 2'-O-methyl ribonucleotide
  modified_base 77..80: mod_base = OTHER; note = phosphorothioate linkage

SEQ ID NO: 3164 - RNA, 80 nt, synthetic construct; identical to SEQ ID NO: 57
  source 1..80: mol_type = other RNA
  modified_base 1: mod_base = OTHER; note = 2'-O-methyl ribonucleotide
  modified_base 8: mod_base = OTHER; note = 2'-O-methyl ribonucleotide
  modified_base 9: mod_base = OTHER; note = 2'-O-methyl ribonucleotide
  modified_base 10: mod_base = OTHER; note = 2'-O-methyl ribonucleotide
  modified_base 11: mod_base = OTHER; note = 2'-O-methyl ribonucleotide
  modified_base 12: mod_base = OTHER; note = 2'-O-methyl ribonucleotide
  modified_base 14: mod_base = OTHER; note = 2'-O-methyl ribonucleotide
  modified_base 15: mod_base = OTHER; note = 2'-O-methyl ribonucleotide
  modified_base 16: mod_base = OTHER; note = 2'-O-methyl ribonucleotide
  modified_base 17: mod_base = OTHER; note = 2'-O-methyl ribonucleotide
  modified_base 18: mod_base = OTHER; note = 2'-O-methyl ribonucleotide
  modified_base 19: mod_base = OTHER; note = 2'-O-methyl ribonucleotide
  modified_base 20: mod_base = OTHER; note = 2'-O-methyl ribonucleotide
  modified_base 21: mod_base = OTHER; note = 2'-O-methyl ribonucleotide
  modified_base 22: mod_base = OTHER; note = 2'-O-methyl ribonucleotide
  modified_base 26: mod_base = OTHER; note = 2'-O-methyl ribonucleotide
  modified_base 28: mod_base = OTHER; note = 2'-O-methyl ribonucleotide
  modified_base 30: mod_base = OTHER; note = 2'-O-methyl ribonucleotide
  modified_base 32: mod_base = OTHER; note = 2'-O-methyl ribonucleotide
  modified_base 33: mod_base = OTHER; note = 2'-O-methyl ribonucleotide
  modified_base 34: mod_base = OTHER; note = 2'-O-methyl ribonucleotide
  modified_base 35: mod_base = OTHER; note = 2'-O-methyl ribonucleotide
  modified_base 36: mod_base = OTHER; note = 2'-O-methyl ribonucleotide
  modified_base 37: mod_base = OTHER; note = 2'-O-methyl ribonucleotide
  modified_base 40: mod_base = OTHER; note = 2'-O-methyl ribonucleotide
  modified_base 41: mod_base = OTHER; note = 2'-O-methyl ribonucleotide
  modified_base 46: mod_base = OTHER; note = 2'-O-methyl ribonucleotide
  modified_base 47: mod_base = OTHER; note = 2'-O-methyl ribonucleotide
  modified_base 50: mod_base = OTHER; note = 2'-O-methyl ribonucleotide
  modified_base 51: mod_base = OTHER; note = 2'-O-methyl ribonucleotide
  modified_base 52: mod_base = OTHER; note = 2'-O-methyl ribonucleotide
  modified_base 54: mod_base = OTHER; note = 2'-O-methyl ribonucleotide
  modified_base 55: mod_base = OTHER; note = 2'-O-methyl ribonucleotide
  modified_base 56: mod_base = OTHER; note = 2'-O-methyl ribonucleotide
  modified_base 57: mod_base = OTHER; note = 2'-O-methyl ribonucleotide
  modified_base 58: mod_base = OTHER; note = 2'-O-methyl ribonucleotide
  modified_base 59: mod_base = OTHER; note = 2'-O-methyl ribonucleotide
  modified_base 60: mod_base = OTHER; note = 2'-O-methyl ribonucleotide
  modified_base 61: mod_base = OTHER; note = 2'-O-methyl ribonucleotide
  modified_base 63: mod_base = OTHER; note = 2'-O-methyl ribonucleotide
  modified_base 64: mod_base = OTHER; note = 2'-O-methyl ribonucleotide
  modified_base 65: mod_base = OTHER; note = 2'-O-methyl ribonucleotide
  modified_base 66: mod_base = OTHER; note = 2'-O-methyl ribonucleotide
  modified_base 67: mod_base = OTHER; note = 2'-O-methyl ribonucleotide
  modified_base 68: mod_base = OTHER; note = 2'-O-methyl ribonucleotide
  modified_base 69: mod_base = OTHER; note = 2'-O-methyl ribonucleotide
  modified_base 70: mod_base = OTHER; note = 2'-O-methyl ribonucleotide
  modified_base 71: mod_base = OTHER; note = 2'-O-methyl ribonucleotide
  modified_base 72: mod_base = OTHER; note = 2'-O-methyl ribonucleotide
  modified_base 73: mod_base = OTHER; note = 2'-O-methyl ribonucleotide
  modified_base 74: mod_base = OTHER; note = 2'-O-methyl ribonucleotide
  modified_base 75: mod_base = OTHER; note = 2'-O-methyl ribonucleotide
  modified_base 76: mod_base = OTHER; note = 2'-O-methyl ribonucleotide
  modified_base 77: mod_base = OTHER; note = 2'-O-methyl ribonucleotide
  modified_base 78: mod_base = OTHER; note = 2'-O-methyl ribonucleotide
  modified_base 79: mod_base = OTHER; note = 2'-O-methyl ribonucleotide
  modified_base 80: mod_base = OTHER; note = 2'-O-methyl ribonucleotide
  modified_base 77..80: mod_base = OTHER; note = phosphorothioate linkage

SEQ ID NO: 3165 - DNA, 23 bp, synthetic construct
  source 1..23: mol_type = other DNA
tccgcaccttggtccagcagggg

SEQ ID NO: 3166 - DNA, 22 bp, synthetic construct
  source 1..22: mol_type = other DNA
accgcacctggcacagcttggg

SEQ ID NO: 3167 - DNA, 22 bp, synthetic construct
  source 1..22: mol_type = other DNA
ccagcacctggcacagcatagg

SEQ ID NO: 3168 - DNA, 22 bp, synthetic construct
  source 1..22: mol_type = other DNA
ccagcacctggcacaggggagg

SEQ ID NO: 3169 - DNA, 23 bp, synthetic construct
  source 1..23: mol_type = other DNA
tcagcaccttggcacagctgaag

SEQ ID NO: 3170 - DNA, 23 bp, synthetic construct
  source 1..23: mol_type = other DNA
ggagcaccttgacccagcagagg

SEQ ID NO: 3171 - DNA, 22 bp, synthetic construct
  source 1..22: mol_type = other DNA
gccgcacctgccgcagccgtgg

SEQ ID NO: 3172 - DNA, 22 bp, synthetic construct
  source 1..22: mol_type = other DNA
ccagcacctggcacagagtagg

SEQ ID NO: 3173 - DNA, 23 bp, synthetic construct
  source 1..23: mol_type = other DNA
cccgcaccttggcgcagcggtgg

SEQ ID NO: 3174 - RNA, 100 nt, synthetic construct; identical to SEQ ID NO: 1905
  source 1..100: mol_type = other RNA
  modified_base 1: mod_base = OTHER; note = 2'-O-methyl ribonucleotide
  modified_base 2: mod_base = OTHER; note = 2'-O-methyl ribonucleotide
  modified_base 3: mod_base = OTHER; note = 2'-O-methyl ribonucleotide
  modified_base 21: mod_base = OTHER; note = 2'-O-methyl ribonucleotide
  modified_base 28: mod_base = OTHER; note = 2'-O-methyl ribonucleotide
  modified_base 29: mod_base = OTHER; note = 2'-O-methyl ribonucleotide
  modified_base 30: mod_base = OTHER; note = 2'-O-methyl ribonucleotide
  modified_base 31: mod_base = OTHER; note = 2'-O-methyl ribonucleotide
  modified_base 32: mod_base = OTHER; note = 2'-O-methyl ribonucleotide
  modified_base 33: mod_base = OTHER; note = 2'-O-methyl ribonucleotide
  modified_base 34: mod_base = OTHER; note = 2'-O-methyl ribonucleotide
  modified_base 35: mod_base = OTHER; note = 2'-O-methyl ribonucleotide
  modified_base 36: mod_base = OTHER; note = 2'-O-methyl ribonucleotide
  modified_base 37: mod_base = OTHER; note = 2'-O-methyl ribonucleotide
  modified_base 38: mod_base = OTHER; note = 2'-O-methyl ribonucleotide
  modified_base 39: mod_base = OTHER; note = 2'-O-methyl ribonucleotide
  modified_base 40: mod_base = OTHER; note = 2'-O-methyl ribonucleotide
  modified_base 41: mod_base = OTHER; note = 2'-O-methyl ribonucleotide
  modified_base 42: mod_base = OTHER; note = 2'-O-methyl ribonucleotide
  modified_base 46: mod_base = OTHER; note = 2'-O-methyl ribonucleotide
  modified_base 48: mod_base = OTHER; note = 2'-O-methyl ribonucleotide
  modified_base 50: mod_base = OTHER; note = 2'-O-methyl ribonucleotide
  modified_base 52: mod_base = OTHER; note = 2'-O-methyl ribonucleotide
  modified_base 53: mod_base = OTHER; note = 2'-O-methyl ribonucleotide
  modified_base 54: mod_base = OTHER; note = 2'-O-methyl ribonucleotide
  modified_base 55: mod_base = OTHER; note = 2'-O-methyl ribonucleotide
  modified_base 56: mod_base = OTHER; note = 2'-O-methyl ribonucleotide
  modified_base 57: mod_base = OTHER; note = 2'-O-methyl ribonucleotide
  modified_base 60: mod_base = OTHER; note = 2'-O-methyl ribonucleotide
  modified_base 61: mod_base = OTHER; note = 2'-O-methyl ribonucleotide
  modified_base 66: mod_base = OTHER; note = 2'-O-methyl ribonucleotide
  modified_base 67: mod_base = OTHER; note = 2'-O-methyl ribonucleotide
  modified_base 70: mod_base = OTHER; note = 2'-O-methyl ribonucleotide
  modified_base 71: mod_base = OTHER; note = 2'-O-methyl ribonucleotide
  modified_base 72: mod_base = OTHER; note = 2'-O-methyl ribonucleotide
  modified_base 73: mod_base = OTHER; note = 2'-O-methyl ribonucleotide
  modified_base 74: mod_base = OTHER; note = 2'-O-methyl ribonucleotide
  modified_base 75: mod_base = OTHER; note = 2'-O-methyl ribonucleotide
  modified_base 76: mod_base = OTHER; note = 2'-O-methyl ribonucleotide
  modified_base 77: mod_base = OTHER; note = 2'-O-methyl ribonucleotide
  modified_base 78: mod_base = OTHER; note = 2'-O-methyl ribonucleotide
  modified_base 79: mod_base = OTHER; note = 2'-O-methyl ribonucleotide
  modified_base 80: mod_base = OTHER; note = 2'-O-methyl ribonucleotide
  modified_base 81: mod_base = OTHER; note = 2'-O-methyl ribonucleotide
  modified_base 83: mod_base = OTHER; note = 2'-O-methyl ribonucleotide
  modified_base 84: mod_base = OTHER; note = 2'-O-methyl ribonucleotide
  modified_base 85: mod_base = OTHER; note = 2'-O-methyl ribonucleotide
  modified_base 86: mod_base = OTHER; note = 2'-O-methyl ribonucleotide
  modified_base 87: mod_base = OTHER; note = 2'-O-methyl ribonucleotide
  modified_base 88: mod_base = OTHER; note = 2'-O-methyl ribonucleotide
  modified_base 89: mod_base = OTHER; note = 2'-O-methyl ribonucleotide
  modified_base 90: mod_base = OTHER; note = 2'-O-methyl ribonucleotide
  modified_base 91: mod_base = OTHER; note = 2'-O-methyl ribonucleotide
  modified_base 92: mod_base = OTHER; note = 2'-O-methyl ribonucleotide
  modified_base 93: mod_base = OTHER; note = 2'-O-methyl ribonucleotide
  modified_base 94: mod_base = OTHER; note = 2'-O-methyl ribonucleotide
  modified_base 95: mod_base = OTHER; note = 2'-O-methyl ribonucleotide
  modified_base 96: mod_base = OTHER; note = 2'-O-methyl ribonucleotide
  modified_base 97: mod_base = OTHER; note = 2'-O-methyl ribonucleotide
  modified_base 98: mod_base = OTHER; note = 2'-O-methyl ribonucleotide
  modified_base 99: mod_base = OTHER; note = 2'-O-methyl ribonucleotide
  modified_base 100: mod_base = OTHER; note = 2'-O-methyl ribonucleotide
  modified_base 9: mod_base = OTHER; note = nebularine
  modified_base 14: mod_base = OTHER; note = nebularine
  modified_base 34: mod_base = OTHER; note = nebularine
  modified_base 1..4: mod_base = OTHER; note = phosphorothioate linkage
  modified_base 97..100: mod_base = OTHER; note = phosphorothioate linkage

SEQ ID NO: 3175 - RNA, 100 nt, synthetic construct; identical to SEQ ID NO: 1917
  source 1..100: mol_type = other RNA
  modified_base 1: mod_base = OTHER; note = 2'-O-methyl ribonucleotide
  modified_base 2: mod_base = OTHER; note = 2'-O-methyl ribonucleotide
  modified_base 3: mod_base = OTHER; note = 2'-O-methyl ribonucleotide
  modified_base 21: mod_base = OTHER; note = 2'-O-methyl ribonucleotide
  modified_base 28: mod_base = OTHER; note = 2'-O-methyl ribonucleotide
  modified_base 29: mod_base = OTHER; note = 2'-O-methyl ribonucleotide
  modified_base 30: mod_base = OTHER; note = 2'-O-methyl ribonucleotide
  modified_base 31: mod_base = OTHER; note = 2'-O-methyl ribonucleotide
  modified_base 32: mod_base = OTHER; note = 2'-O-methyl ribonucleotide
  modified_base 33: mod_base = OTHER; note = 2'-O-methyl ribonucleotide
  modified_base 34: mod_base = OTHER; note = 2'-O-methyl ribonucleotide
  modified_base 35: mod_base = OTHER; note = 2'-O-methyl ribonucleotide
  modified_base 36: mod_base = OTHER; note = 2'-O-methyl ribonucleotide
  modified_base 37: mod_base = OTHER; note = 2'-O-methyl ribonucleotide
  modified_base 38: mod_base = OTHER; note = 2'-O-methyl ribonucleotide
  modified_base 39: mod_base = OTHER; note = 2'-O-methyl ribonucleotide
  modified_base 40: mod_base = OTHER; note = 2'-O-methyl ribonucleotide
  modified_base 41: mod_base = OTHER; note = 2'-O-methyl ribonucleotide
  modified_base 42: mod_base = OTHER; note = 2'-O-methyl ribonucleotide
  modified_base 46: mod_base = OTHER; note = 2'-O-methyl ribonucleotide
  modified_base 48: mod_base = OTHER; note = 2'-O-methyl ribonucleotide
  modified_base 50: mod_base = OTHER; note = 2'-O-methyl ribonucleotide
  modified_base 52: mod_base = OTHER; note = 2'-O-methyl ribonucleotide
  modified_base 53: mod_base = OTHER; note = 2'-O-methyl ribonucleotide
  modified_base 54: mod_base = OTHER; note = 2'-O-methyl ribonucleotide
  modified_base 55: mod_base = OTHER; note = 2'-O-methyl ribonucleotide
  modified_base 56: mod_base = OTHER; note = 2'-O-methyl ribonucleotide
  modified_base 57: mod_base = OTHER; note = 2'-O-methyl ribonucleotide
  modified_base 60: mod_base = OTHER; note = 2'-O-methyl ribonucleotide
  modified_base 61: mod_base = OTHER; note = 2'-O-methyl ribonucleotide
  modified_base 66: mod_base = OTHER; note = 2'-O-methyl ribonucleotide
  modified_base 67: mod_base = OTHER; note = 2'-O-methyl ribonucleotide
  modified_base 70: mod_base = OTHER; note = 2'-O-methyl ribonucleotide
  modified_base 71: mod_base = OTHER; note = 2'-O-methyl ribonucleotide
  modified_base 72: mod_base = OTHER; note = 2'-O-methyl ribonucleotide
  modified_base 73: mod_base = OTHER; note = 2'-O-methyl ribonucleotide
  modified_base 74: mod_base = OTHER; note = 2'-O-methyl ribonucleotide
  modified_base 75: mod_base = OTHER; note = 2'-O-methyl ribonucleotide
  modified_base 76: mod_base = OTHER; note = 2'-O-methyl ribonucleotide
  modified_base 77: mod_base = OTHER; note = 2'-O-methyl ribonucleotide
  modified_base 78: mod_base = OTHER; note = 2'-O-methyl ribonucleotide
  modified_base 79: mod_base = OTHER; note = 2'-O-methyl ribonucleotide
  modified_base 80: mod_base = OTHER; note = 2'-O-methyl ribonucleotide
  modified_base 81: mod_base = OTHER; note = 2'-O-methyl ribonucleotide
  modified_base 83: mod_base = OTHER; note = 2'-O-methyl ribonucleotide
  modified_base 84: mod_base = OTHER; note = 2'-O-methyl ribonucleotide
  modified_base 85: mod_base = OTHER; note = 2'-O-methyl ribonucleotide
  modified_base 86: mod_base = OTHER; note = 2'-O-methyl ribonucleotide
  modified_base 87: mod_base = OTHER; note = 2'-O-methyl ribonucleotide
  modified_base 88: mod_base = OTHER; note = 2'-O-methyl ribonucleotide
  modified_base 89: mod_base = OTHER; note = 2'-O-methyl ribonucleotide
  modified_base 90: mod_base = OTHER; note = 2'-O-methyl ribonucleotide
  modified_base 91: mod_base = OTHER; note = 2'-O-methyl ribonucleotide
  modified_base 92: mod_base = OTHER; note = 2'-O-methyl ribonucleotide
  modified_base 93: mod_base = OTHER; note = 2'-O-methyl ribonucleotide
  modified_base 94: mod_base = OTHER; note = 2'-O-methyl ribonucleotide
  modified_base 95: mod_base = OTHER; note = 2'-O-methyl ribonucleotide
  modified_base 96: mod_base = OTHER; note = 2'-O-methyl ribonucleotide
  modified_base 97: mod_base = OTHER; note = 2'-O-methyl ribonucleotide
  modified_base 98: mod_base = OTHER; note = 2'-O-methyl ribonucleotide
  modified_base 99: mod_base = OTHER; note = 2'-O-methyl ribonucleotide
  modified_base 100: mod_base = OTHER; note = 2'-O-methyl ribonucleotide
  modified_base 14: mod_base = OTHER; note = nebularine
  modified_base 57: mod_base = OTHER; note = nebularine
  modified_base 1..4: mod_base = OTHER; note = phosphorothioate linkage
  modified_base 97..100: mod_base = OTHER; note = phosphorothioate linkage

SEQ ID NO: 3176 - RNA, 100 nt, synthetic construct; identical to SEQ ID NO: 1915
  source 1..100: mol_type = other RNA
  modified_base 1: mod_base = OTHER; note = 2'-O-methyl ribonucleotide
  modified_base 2: mod_base = OTHER; note = 2'-O-methyl ribonucleotide
  modified_base 3: mod_base = OTHER; note = 2'-O-methyl ribonucleotide
  modified_base 21: mod_base = OTHER; note = 2'-O-methyl ribonucleotide
  modified_base 28: mod_base = OTHER; note = 2'-O-methyl ribonucleotide
  modified_base 29: mod_base = OTHER; note = 2'-O-methyl ribonucleotide
  modified_base 30: mod_base = OTHER; note = 2'-O-methyl ribonucleotide
  modified_base 31: mod_base = OTHER; note = 2'-O-methyl ribonucleotide
  modified_base 32: mod_base = OTHER; note = 2'-O-methyl ribonucleotide
  modified_base 33: mod_base = OTHER; note = 2'-O-methyl ribonucleotide
  modified_base 34: mod_base = OTHER; note = 2'-O-methyl ribonucleotide
  modified_base 35: mod_base = OTHER; note = 2'-O-methyl ribonucleotide
  modified_base 36: mod_base = OTHER; note = 2'-O-methyl ribonucleotide
  modified_base 37: mod_base = OTHER; note = 2'-O-methyl ribonucleotide
  modified_base 38: mod_base = OTHER; note = 2'-O-methyl ribonucleotide
  modified_base 39: mod_base = OTHER; note = 2'-O-methyl ribonucleotide
  modified_base 40: mod_base = OTHER; note = 2'-O-methyl ribonucleotide
  modified_base 41: mod_base = OTHER; note = 2'-O-methyl ribonucleotide
  modified_base 42: mod_base = OTHER; note = 2'-O-methyl ribonucleotide
  modified_base 46: mod_base = OTHER; note = 2'-O-methyl ribonucleotide
  modified_base 48: mod_base = OTHER; note = 2'-O-methyl ribonucleotide
  modified_base 50: mod_base = OTHER; note = 2'-O-methyl ribonucleotide
  modified_base 52: mod_base = OTHER; note = 2'-O-methyl ribonucleotide
  modified_base 53: mod_base = OTHER; note = 2'-O-methyl ribonucleotide
  modified_base 54: mod_base = OTHER; note = 2'-O-methyl ribonucleotide
  modified_base 55: mod_base = OTHER; note = 2'-O-methyl ribonucleotide
  modified_base 56: mod_base = OTHER; note = 2'-O-methyl ribonucleotide
  modified_base 57: mod_base = OTHER; note = 2'-O-methyl ribonucleotide
  modified_base 60: mod_base = OTHER; note = 2'-O-methyl ribonucleotide
  modified_base 61: mod_base = OTHER; note = 2'-O-methyl ribonucleotide
  modified_base 66: mod_base = OTHER; note = 2'-O-methyl ribonucleotide
  modified_base 67: mod_base = OTHER; note = 2'-O-methyl ribonucleotide
  modified_base 70: mod_base = OTHER; note = 2'-O-methyl ribonucleotide
  modified_base 71: mod_base = OTHER; note = 2'-O-methyl ribonucleotide
  modified_base 72: mod_base = OTHER; note = 2'-O-methyl ribonucleotide
  modified_base 73: mod_base = OTHER; note = 2'-O-methyl ribonucleotide
  modified_base 74: mod_base = OTHER; note = 2'-O-methyl ribonucleotide
  modified_base 75: mod_base = OTHER; note = 2'-O-methyl ribonucleotide
  modified_base 76: mod_base = OTHER; note = 2'-O-methyl ribonucleotide
  modified_base 77: mod_base = OTHER; note = 2'-O-methyl ribonucleotide
  modified_base 78: mod_base = OTHER; note = 2'-O-methyl ribonucleotide
  modified_base 79: mod_base = OTHER; note = 2'-O-methyl ribonucleotide
  modified_base 80: mod_base = OTHER; note = 2'-O-methyl ribonucleotide
  modified_base 81: mod_base = OTHER; note = 2'-O-methyl ribonucleotide
  modified_base 83: mod_base = OTHER; note = 2'-O-methyl ribonucleotide
  modified_base 84: mod_base = OTHER; note = 2'-O-methyl ribonucleotide
  modified_base 85: mod_base = OTHER; note = 2'-O-methyl ribonucleotide
  modified_base 86: mod_base = OTHER; note = 2'-O-methyl ribonucleotide
  modified_base 87: mod_base = OTHER; note = 2'-O-methyl ribonucleotide
  modified_base 88: mod_base = OTHER; note = 2'-O-methyl ribonucleotide
  modified_base 89: mod_base = OTHER; note = 2'-O-methyl ribonucleotide
  modified_base 90: mod_base = OTHER; note = 2'-O-methyl ribonucleotide
  modified_base 91: mod_base = OTHER; note = 2'-O-methyl ribonucleotide
  modified_base 92: mod_base = OTHER; note = 2'-O-methyl ribonucleotide
  modified_base 93: mod_base = OTHER; note = 2'-O-methyl ribonucleotide
  modified_base 94: mod_base = OTHER; note = 2'-O-methyl ribonucleotide
  modified_base 95: mod_base = OTHER; note = 2'-O-methyl ribonucleotide
  modified_base 96: mod_base = OTHER; note = 2'-O-methyl ribonucleotide
  modified_base 97: mod_base = OTHER; note = 2'-O-methyl ribonucleotide
  modified_base 98: mod_base = OTHER; note = 2'-O-methyl ribonucleotide
  modified_base 99: mod_base = OTHER; note = 2'-O-methyl ribonucleotide
  modified_base 100: mod_base = OTHER; note = 2'-O-methyl ribonucleotide
  modified_base 14: mod_base = OTHER; note = nebularine
  modified_base 34: mod_base = OTHER; note = nebularine
  modified_base 1..4: mod_base = OTHER; note = phosphorothioate linkage
  modified_base 97..100: mod_base = OTHER; note = phosphorothioate linkage

SEQ ID NO: 3177 - RNA, 100 nt, synthetic construct; identical to SEQ ID NO: 1911
  source 1..100: mol_type = other RNA
  modified_base 1: mod_base = OTHER; note = 2'-O-methyl ribonucleotide
  modified_base 2: mod_base = OTHER; note = 2'-O-methyl ribonucleotide
  modified_base 3: mod_base = OTHER; note = 2'-O-methyl ribonucleotide
  modified_base 21: mod_base = OTHER; note = 2'-O-methyl ribonucleotide
  modified_base 28: mod_base = OTHER; note = 2'-O-methyl ribonucleotide
  modified_base 29: mod_base = OTHER; note = 2'-O-methyl ribonucleotide
  modified_base 30: mod_base = OTHER; note = 2'-O-methyl ribonucleotide
  modified_base 31: mod_base = OTHER; note = 2'-O-methyl ribonucleotide
  modified_base 32: mod_base = OTHER; note = 2'-O-methyl ribonucleotide
  modified_base 33: mod_base = OTHER; note = 2'-O-methyl ribonucleotide
  modified_base 34: mod_base = OTHER; note = 2'-O-methyl ribonucleotide
  modified_base 35: mod_base = OTHER; note = 2'-O-methyl ribonucleotide
  modified_base 36: mod_base = OTHER; note = 2'-O-methyl ribonucleotide
  modified_base 37: mod_base = OTHER; note = 2'-O-methyl ribonucleotide
  modified_base 38: mod_base = OTHER; note = 2'-O-methyl ribonucleotide
  modified_base 39: mod_base = OTHER; note = 2'-O-methyl ribonucleotide
  modified_base 40: mod_base = OTHER; note = 2'-O-methyl ribonucleotide
  modified_base 41: mod_base = OTHER; note = 2'-O-methyl ribonucleotide
  modified_base 42: mod_base = OTHER; note = 2'-O-methyl ribonucleotide
  modified_base 46: mod_base = OTHER; note = 2'-O-methyl ribonucleotide
  modified_base 48: mod_base = OTHER; note = 2'-O-methyl ribonucleotide
  modified_base 50: mod_base = OTHER; note = 2'-O-methyl ribonucleotide
  modified_base 52: mod_base = OTHER; note = 2'-O-methyl ribonucleotide
  modified_base 53: mod_base = OTHER; note = 2'-O-methyl ribonucleotide
  modified_base 54: mod_base = OTHER; note = 2'-O-methyl ribonucleotide
  modified_base 55: mod_base = OTHER; note = 2'-O-methyl ribonucleotide
  modified_base 56: mod_base = OTHER; note = 2'-O-methyl ribonucleotide
  modified_base 57: mod_base = OTHER; note = 2'-O-methyl ribonucleotide
  modified_base 60: mod_base = OTHER; note = 2'-O-methyl ribonucleotide
  modified_base 61: mod_base = OTHER; note = 2'-O-methyl ribonucleotide
  modified_base 66: mod_base = OTHER; note = 2'-O-methyl ribonucleotide
  modified_base 67: mod_base = OTHER; note = 2'-O-methyl ribonucleotide
  modified_base 70: mod_base = OTHER; note = 2'-O-methyl ribonucleotide
  modified_base 71: mod_base = OTHER; note = 2'-O-methyl ribonucleotide
  modified_base 72: mod_base = OTHER; note = 2'-O-methyl ribonucleotide
  modified_base 73: mod_base = OTHER; note = 2'-O-methyl ribonucleotide
  modified_base 74: mod_base = OTHER; note = 2'-O-methyl ribonucleotide
  modified_base 75: mod_base = OTHER; note = 2'-O-methyl ribonucleotide
  modified_base 76: mod_base = OTHER; note = 2'-O-methyl ribonucleotide
  modified_base 77: mod_base = OTHER; note = 2'-O-methyl ribonucleotide
  modified_base 78: mod_base = OTHER; note = 2'-O-methyl ribonucleotide
  modified_base 79: mod_base = OTHER; note = 2'-O-methyl ribonucleotide
  modified_base 80: mod_base = OTHER; note = 2'-O-methyl ribonucleotide
  modified_base 81: mod_base = OTHER; note = 2'-O-methyl ribonucleotide
  modified_base 83: mod_base = OTHER; note = 2'-O-methyl ribonucleotide
  modified_base 84: mod_base = OTHER; note = 2'-O-methyl ribonucleotide
  modified_base 85: mod_base = OTHER; note = 2'-O-methyl ribonucleotide
  modified_base 86: mod_base = OTHER; note = 2'-O-methyl ribonucleotide
  modified_base 87: mod_base = OTHER; note = 2'-O-methyl ribonucleotide
  modified_base 88: mod_base = OTHER; note = 2'-O-methyl ribonucleotide
  modified_base 89: mod_base = OTHER; note = 2'-O-methyl ribonucleotide
  modified_base 90: mod_base = OTHER; note = 2'-O-methyl ribonucleotide
  modified_base 91: mod_base = OTHER; note = 2'-O-methyl ribonucleotide
  modified_base 92: mod_base = OTHER; note = 2'-O-methyl ribonucleotide
  modified_base 93: mod_base = OTHER; note = 2'-O-methyl ribonucleotide
  modified_base 94: mod_base = OTHER; note = 2'-O-methyl ribonucleotide
  modified_base 95: mod_base = OTHER; note = 2'-O-methyl ribonucleotide
  modified_base 96: mod_base = OTHER; note = 2'-O-methyl ribonucleotide
  modified_base 97: mod_base = OTHER; note = 2'-O-methyl ribonucleotide
  modified_base 98: mod_base = OTHER; note = 2'-O-methyl ribonucleotide
  modified_base 99: mod_base = OTHER; note = 2'-O-methyl ribonucleotide
  modified_base 100: mod_base = OTHER; note = 2'-O-methyl ribonucleotide
  modified_base 9: mod_base = OTHER; note = nebularine
  modified_base 57: mod_base = OTHER; note = nebularine
  modified_base 1..4: mod_base = OTHER; note = phosphorothioate linkage
  modified_base 97..100: mod_base = OTHER; note = phosphorothioate linkage

SEQ ID NO: 3178 - RNA, 100 nt, synthetic construct; identical to SEQ ID NO: 1905
  source 1..100: mol_type = other RNA
  modified_base 1: mod_base = OTHER; note = 2'-O-methyl ribonucleotide
  modified_base 2: mod_base = OTHER; note = 2'-O-methyl ribonucleotide
  modified_base 3: mod_base = OTHER; note = 2'-O-methyl ribonucleotide
  modified_base 21: mod_base = OTHER; note = 2'-O-methyl ribonucleotide
  modified_base 28: mod_base = OTHER; note = 2'-O-methyl ribonucleotide
  modified_base 29: mod_base = OTHER; note = 2'-O-methyl ribonucleotide
  modified_base 30: mod_base = OTHER; note = 2'-O-methyl ribonucleotide
  modified_base 31: mod_base = OTHER; note = 2'-O-methyl ribonucleotide
  modified_base 32: mod_base = OTHER; note = 2'-O-methyl ribonucleotide
  modified_base 33: mod_base = OTHER; note = 2'-O-methyl ribonucleotide
  modified_base 34: mod_base = OTHER; note = 2'-O-methyl ribonucleotide
  modified_base 35: mod_base = OTHER; note = 2'-O-methyl ribonucleotide
  modified_base 36: mod_base = OTHER; note = 2'-O-methyl ribonucleotide
  modified_base 37: mod_base = OTHER; note = 2'-O-methyl ribonucleotide
  modified_base 38: mod_base = OTHER; note = 2'-O-methyl ribonucleotide
  modified_base 39: mod_base = OTHER; note = 2'-O-methyl ribonucleotide
  modified_base 40: mod_base = OTHER; note = 2'-O-methyl ribonucleotide
  modified_base 41: mod_base = OTHER; note = 2'-O-methyl ribonucleotide
  modified_base 42: mod_base = OTHER; note = 2'-O-methyl ribonucleotide
  modified_base 46: mod_base = OTHER; note = 2'-O-methyl ribonucleotide
  modified_base 48: mod_base = OTHER; note = 2'-O-methyl ribonucleotide
  modified_base 50: mod_base = OTHER; note = 2'-O-methyl ribonucleotide
  modified_base 52: mod_base = OTHER; note = 2'-O-methyl ribonucleotide
  modified_base 53: mod_base = OTHER; note = 2'-O-methyl ribonucleotide
  modified_base 54: mod_base = OTHER; note = 2'-O-methyl ribonucleotide
  modified_base 55: mod_base = OTHER; note = 2'-O-methyl ribonucleotide
  modified_base 56: mod_base = OTHER; note = 2'-O-methyl ribonucleotide
  modified_base 57: mod_base = OTHER; note = 2'-O-methyl ribonucleotide
  modified_base 60: mod_base = OTHER; note = 2'-O-methyl ribonucleotide
  modified_base 61: mod_base = OTHER; note = 2'-O-methyl ribonucleotide
  modified_base 66: mod_base = OTHER; note = 2'-O-methyl ribonucleotide
  modified_base 67: mod_base = OTHER; note = 2'-O-methyl ribonucleotide
  modified_base 70: mod_base = OTHER; note = 2'-O-methyl ribonucleotide
  modified_base 71: mod_base = OTHER; note = 2'-O-methyl ribonucleotide
  modified_base 72: mod_base = OTHER; note = 2'-O-methyl ribonucleotide
  modified_base 73: mod_base = OTHER; note = 2'-O-methyl ribonucleotide
  modified_base 74: mod_base = OTHER; note = 2'-O-methyl ribonucleotide
  modified_base 75: mod_base = OTHER; note = 2'-O-methyl ribonucleotide
  modified_base 76: mod_base = OTHER; note = 2'-O-methyl ribonucleotide
  modified_base 77: mod_base = OTHER; note = 2'-O-methyl ribonucleotide
  modified_base 78: mod_base = OTHER; note = 2'-O-methyl ribonucleotide
  modified_base 79: mod_base = OTHER; note = 2'-O-methyl ribonucleotide
  modified_base 80: mod_base = OTHER; note = 2'-O-methyl ribonucleotide
  modified_base 81: mod_base = OTHER; note = 2'-O-methyl ribonucleotide
  modified_base 83: mod_base = OTHER; note = 2'-O-methyl ribonucleotide
  modified_base 84: mod_base = OTHER; note = 2'-O-methyl ribonucleotide
  modified_base 85: mod_base = OTHER; note = 2'-O-methyl ribonucleotide
  modified_base 86: mod_base = OTHER; note = 2'-O-methyl ribonucleotide
  modified_base 87: mod_base = OTHER; note = 2'-O-methyl ribonucleotide
  modified_base 88: mod_base = OTHER; note = 2'-O-methyl ribonucleotide
  modified_base 89: mod_base = OTHER; note = 2'-O-methyl ribonucleotide
  modified_base 90: mod_base = OTHER; note = 2'-O-methyl ribonucleotide
  modified_base 91: mod_base = OTHER; note = 2'-O-methyl ribonucleotide
  modified_base 92: mod_base = OTHER; note = 2'-O-methyl ribonucleotide
  modified_base 93: mod_base = OTHER; note = 2'-O-methyl ribonucleotide
  modified_base 94: mod_base = OTHER; note = 2'-O-methyl ribonucleotide
  modified_base 95: mod_base = OTHER; note = 2'-O-methyl ribonucleotide
  modified_base 96: mod_base = OTHER; note = 2'-O-methyl ribonucleotide
  modified_base 97: mod_base = OTHER; note = 2'-O-methyl ribonucleotide
  modified_base 98: mod_base = OTHER; note = 2'-O-methyl ribonucleotide
  modified_base 99: mod_base = OTHER; note = 2'-O-methyl ribonucleotide
  modified_base 100: mod_base = OTHER; note = 2'-O-methyl ribonucleotide
  modified_base 9: mod_base = OTHER; note = nebularine
  modified_base 14: mod_base = OTHER; note = nebularine
  modified_base 34: mod_base = OTHER; note = nebularine
  modified_base 1..3: mod_base = OTHER; note = phosphorothioate linkage
  modified_base 97..100: mod_base = OTHER; note = phosphorothioate linkage

SEQ ID NO: 3179 - RNA, 100 nt, synthetic construct; identical to SEQ ID NO: 1917
  source 1..100: mol_type = other RNA
  modified_base 1: mod_base = OTHER; note = 2'-O-methyl ribonucleotide
  modified_base 2: mod_base = OTHER; note = 2'-O-methyl ribonucleotide
  modified_base 3: mod_base = OTHER; note = 2'-O-methyl ribonucleotide
  modified_base 21: mod_base = OTHER; note = 2'-O-methyl ribonucleotide
  modified_base 28: mod_base = OTHER; note = 2'-O-methyl ribonucleotide
  modified_base 29: mod_base = OTHER; note = 2'-O-methyl ribonucleotide
  modified_base 30: mod_base = OTHER; note = 2'-O-methyl ribonucleotide
  modified_base 31: mod_base = OTHER; note = 2'-O-methyl ribonucleotide
  modified_base 32: mod_base = OTHER; note = 2'-O-methyl ribonucleotide
  modified_base 33: mod_base = OTHER; note = 2'-O-methyl ribonucleotide
  modified_base 34: mod_base = OTHER; note = 2'-O-methyl ribonucleotide
  modified_base 35: mod_base = OTHER; note = 2'-O-methyl ribonucleotide
  modified_base 36: mod_base = OTHER; note = 2'-O-methyl ribonucleotide
  modified_base 37: mod_base = OTHER; note = 2'-O-methyl ribonucleotide
  modified_base 38: mod_base = OTHER; note = 2'-O-methyl ribonucleotide
  modified_base 39: mod_base = OTHER; note = 2'-O-methyl ribonucleotide
  modified_base 40: mod_base = OTHER; note = 2'-O-methyl ribonucleotide
  modified_base 41: mod_base = OTHER; note = 2'-O-methyl ribonucleotide
  modified_base 42: mod_base = OTHER; note = 2'-O-methyl ribonucleotide
  modified_base 46: mod_base = OTHER; note = 2'-O-methyl ribonucleotide
  modified_base 48: mod_base = OTHER; note = 2'-O-methyl ribonucleotide
  modified_base 50: mod_base = OTHER; note = 2'-O-methyl ribonucleotide
  modified_base 52: mod_base = OTHER; note = 2'-O-methyl ribonucleotide
  modified_base 53: mod_base = OTHER; note = 2'-O-methyl ribonucleotide
  modified_base 54: mod_base = OTHER; note = 2'-O-methyl ribonucleotide
  modified_base 55: mod_base = OTHER; note = 2'-O-methyl ribonucleotide
  modified_base 56: mod_base = OTHER; note = 2'-O-methyl ribonucleotide
  modified_base 57: mod_base = OTHER; note = 2'-O-methyl ribonucleotide
  modified_base 60: mod_base = OTHER; note = 2'-O-methyl ribonucleotide
  modified_base 61: mod_base = OTHER; note = 2'-O-methyl ribonucleotide
  modified_base 66: mod_base = OTHER; note = 2'-O-methyl ribonucleotide
  modified_base 67: mod_base = OTHER; note = 2'-O-methyl ribonucleotide
  modified_base 70: mod_base = OTHER; note = 2'-O-methyl ribonucleotide
  modified_base 71: mod_base = OTHER; note = 2'-O-methyl ribonucleotide
  modified_base 72: mod_base = OTHER; note = 2'-O-methyl ribonucleotide
  modified_base 73: mod_base = OTHER; note = 2'-O-methyl ribonucleotide
  modified_base 74: mod_base = OTHER; note = 2'-O-methyl ribonucleotide
  modified_base 75: mod_base = OTHER; note = 2'-O-methyl ribonucleotide
  modified_base 76: mod_base = OTHER; note = 2'-O-methyl ribonucleotide
  modified_base 77: mod_base = OTHER; note = 2'-O-methyl ribonucleotide
  modified_base 78: mod_base = OTHER; note = 2'-O-methyl ribonucleotide
  modified_base 79: mod_base = OTHER; note = 2'-O-methyl ribonucleotide
  modified_base 80: mod_base = OTHER; note = 2'-O-methyl ribonucleotide
  modified_base 81: mod_base = OTHER; note = 2'-O-methyl ribonucleotide
  modified_base 83: mod_base = OTHER; note = 2'-O-methyl ribonucleotide
  modified_base 84: mod_base = OTHER; note = 2'-O-methyl ribonucleotide
  modified_base 85: mod_base = OTHER; note = 2'-O-methyl ribonucleotide
  modified_base 86: mod_base = OTHER; note = 2'-O-methyl ribonucleotide
  modified_base 87: mod_base = OTHER; note = 2'-O-methyl ribonucleotide
  modified_base 88: mod_base = OTHER; note = 2'-O-methyl ribonucleotide
  modified_base 89: mod_base = OTHER; note = 2'-O-methyl ribonucleotide
  modified_base 90: mod_base = OTHER; note = 2'-O-methyl ribonucleotide
  modified_base 91: mod_base = OTHER; note = 2'-O-methyl ribonucleotide
  modified_base 92: mod_base = OTHER; note = 2'-O-methyl ribonucleotide
  modified_base 93: mod_base = OTHER; note = 2'-O-methyl ribonucleotide
  modified_base 94: mod_base = OTHER; note = 2'-O-methyl ribonucleotide
  modified_base 95: mod_base = OTHER; note = 2'-O-methyl ribonucleotide
  modified_base 96: mod_base = OTHER; note = 2'-O-methyl ribonucleotide
  modified_base 97: mod_base = OTHER; note = 2'-O-methyl ribonucleotide
  modified_base 98: mod_base = OTHER; note = 2'-O-methyl ribonucleotide
  modified_base 99: mod_base = OTHER; note = 2'-O-methyl ribonucleotide
  modified_base 100: mod_base = OTHER; note = 2'-O-methyl ribonucleotide
  modified_base 14: mod_base = OTHER; note = nebularine
  modified_base 57: mod_base = OTHER; note = nebularine
  modified_base 1..3: mod_base = OTHER; note = phosphorothioate linkage
  modified_base 97..100: mod_base = OTHER; note = phosphorothioate linkage

SEQ ID NO: 3180 - RNA, 100 nt, synthetic construct; identical to SEQ ID NO: 1915
  source 1..100: mol_type = other RNA
  modified_base 1: mod_base = OTHER; note = 2'-O-methyl ribonucleotide
  modified_base 2: mod_base = OTHER; note = 2'-O-methyl ribonucleotide
  modified_base 3: mod_base = OTHER; note = 2'-O-methyl ribonucleotide
  modified_base 21: mod_base = OTHER; note = 2'-O-methyl ribonucleotide
  modified_base 28: mod_base = OTHER; note = 2'-O-methyl ribonucleotide
  modified_base 29: mod_base = OTHER; note = 2'-O-methyl ribonucleotide
  modified_base 30: mod_base = OTHER; note = 2'-O-methyl ribonucleotide
  modified_base 31: mod_base = OTHER; note = 2'-O-methyl ribonucleotide
  modified_base 32: mod_base = OTHER; note = 2'-O-methyl ribonucleotide
  modified_base 33: mod_base = OTHER; note = 2'-O-methyl ribonucleotide
  modified_base 34: mod_base = OTHER; note = 2'-O-methyl ribonucleotide
  modified_base 35: mod_base = OTHER; note = 2'-O-methyl ribonucleotide
  modified_base 36: mod_base = OTHER; note = 2'-O-methyl ribonucleotide
  modified_base 37: mod_base = OTHER; note = 2'-O-methyl ribonucleotide
  modified_base 38: mod_base = OTHER; note = 2'-O-methyl ribonucleotide
  modified_base 39: mod_base = OTHER; note = 2'-O-methyl ribonucleotide
  modified_base 40: mod_base = OTHER; note = 2'-O-methyl ribonucleotide
  modified_base 41: mod_base = OTHER; note = 2'-O-methyl ribonucleotide
  modified_base 42: mod_base = OTHER; note = 2'-O-methyl ribonucleotide
  modified_base 46: mod_base = OTHER; note = 2'-O-methyl ribonucleotide
  modified_base 48: mod_base = OTHER; note = 2'-O-methyl ribonucleotide
  modified_base 50: mod_base = OTHER; note = 2'-O-methyl ribonucleotide
  modified_base 52: mod_base = OTHER; note = 2'-O-methyl ribonucleotide
  modified_base 53: mod_base = OTHER; note = 2'-O-methyl ribonucleotide
  modified_base 54: mod_base = OTHER; note = 2'-O-methyl ribonucleotide
  modified_base 55: mod_base = OTHER; note = 2'-O-methyl ribonucleotide
  modified_base 56: mod_base = OTHER; note = 2'-O-methyl ribonucleotide
  modified_base 57: mod_base = OTHER; note = 2'-O-methyl ribonucleotide
  modified_base 60: mod_base = OTHER; note = 2'-O-methyl ribonucleotide
  modified_base 61: mod_base = OTHER; note = 2'-O-methyl ribonucleotide
  modified_base 66: mod_base = OTHER; note = 2'-O-methyl ribonucleotide
  modified_base 67: mod_base = OTHER; note = 2'-O-methyl ribonucleotide
  modified_base 70: mod_base = OTHER; note = 2'-O-methyl ribonucleotide
  modified_base 71: mod_base = OTHER; note = 2'-O-methyl ribonucleotide
  modified_base 72: mod_base = OTHER; note = 2'-O-methyl ribonucleotide
  modified_base 73: mod_base = OTHER; note = 2'-O-methyl ribonucleotide
  modified_base 74: mod_base = OTHER; note = 2'-O-methyl ribonucleotide
  modified_base 75: mod_base = OTHER; note = 2'-O-methyl ribonucleotide
  modified_base 76: mod_base = OTHER; note = 2'-O-methyl ribonucleotide
  modified_base 77: mod_base = OTHER; note = 2'-O-methyl ribonucleotide
  modified_base 78: mod_base = OTHER; note = 2'-O-methyl ribonucleotide
  modified_base 79: mod_base = OTHER; note = 2'-O-methyl ribonucleotide
  modified_base 80: mod_base = OTHER; note = 2'-O-methyl ribonucleotide
  modified_base 81: mod_base = OTHER; note = 2'-O-methyl ribonucleotide
  modified_base 83: mod_base = OTHER; note = 2'-O-methyl ribonucleotide
  modified_base 84: mod_base = OTHER; note = 2'-O-methyl ribonucleotide
  modified_base 85: mod_base = OTHER; note = 2'-O-methyl ribonucleotide
  modified_base 86: mod_base = OTHER; note = 2'-O-methyl ribonucleotide
  modified_base 87: mod_base = OTHER; note = 2'-O-methyl ribonucleotide
  modified_base 88: mod_base = OTHER; note = 2'-O-methyl ribonucleotide
  modified_base 89: mod_base = OTHER; note = 2'-O-methyl ribonucleotide
  modified_base 90: mod_base = OTHER; note = 2'-O-methyl ribonucleotide
  modified_base 91: mod_base = OTHER; note = 2'-O-methyl ribonucleotide
  modified_base 92: mod_base = OTHER; note = 2'-O-methyl ribonucleotide
  modified_base 93: mod_base = OTHER; note = 2'-O-methyl ribonucleotide
  modified_base 94: mod_base = OTHER; note = 2'-O-methyl ribonucleotide
  modified_base 95: mod_base = OTHER; note = 2'-O-methyl ribonucleotide
  modified_base 96: mod_base = OTHER; note = 2'-O-methyl ribonucleotide
  modified_base 97: mod_base = OTHER; note = 2'-O-methyl ribonucleotide
  modified_base 98: mod_base = OTHER; note = 2'-O-methyl ribonucleotide
  modified_base 99: mod_base = OTHER; note = 2'-O-methyl ribonucleotide
  modified_base 100: mod_base = OTHER; note = 2'-O-methyl ribonucleotide
  modified_base 14: mod_base = OTHER; note = nebularine
  modified_base 34: mod_base = OTHER; note = nebularine
  modified_base 1..3: mod_base = OTHER; note = phosphorothioate linkage
  modified_base 97..100: mod_base = OTHER; note = phosphorothioate linkage

SEQ ID NO: 3181 - RNA, 100 nt, synthetic construct; identical to SEQ ID NO: 1911
  source 1..100: mol_type = other RNA
  modified_base 1: mod_base = OTHER; note = 2'-O-methyl ribonucleotide
  modified_base 2: mod_base = OTHER; note = 2'-O-methyl ribonucleotide
  modified_base 3: mod_base = OTHER; note = 2'-O-methyl ribonucleotide
  modified_base 21: mod_base = OTHER; note = 2'-O-methyl ribonucleotide
  modified_base 28: mod_base = OTHER; note = 2'-O-methyl ribonucleotide
  modified_base 29: mod_base = OTHER; note = 2'-O-methyl ribonucleotide
  modified_base 30: mod_base = OTHER; note = 2'-O-methyl ribonucleotide
  modified_base 31: mod_base = OTHER; note = 2'-O-methyl ribonucleotide
  modified_base 32: mod_base = OTHER; note = 2'-O-methyl ribonucleotide
  modified_base 33: mod_base = OTHER; note = 2'-O-methyl ribonucleotide
  modified_base 34: mod_base = OTHER; note = 2'-O-methyl ribonucleotide
  modified_base 35: mod_base = OTHER; note = 2'-O-methyl ribonucleotide
  modified_base 36: mod_base = OTHER; note = 2'-O-methyl ribonucleotide
  modified_base 37: mod_base = OTHER; note = 2'-O-methyl ribonucleotide
  modified_base 38: mod_base = OTHER; note = 2'-O-methyl ribonucleotide
  modified_base 39: mod_base = OTHER; note = 2'-O-methyl ribonucleotide
  modified_base 40: mod_base = OTHER; note = 2'-O-methyl ribonucleotide
  modified_base 41: mod_base = OTHER; note = 2'-O-methyl ribonucleotide
  modified_base 42: mod_base = OTHER; note = 2'-O-methyl ribonucleotide
  modified_base 46: mod_base = OTHER; note = 2'-O-methyl ribonucleotide
  modified_base 48: mod_base = OTHER; note = 2'-O-methyl ribonucleotide
  modified_base 50: mod_base = OTHER; note = 2'-O-methyl ribonucleotide
  modified_base 52: mod_base = OTHER; note = 2'-O-methyl ribonucleotide
  modified_base 53: mod_base = OTHER; note = 2'-O-methyl ribonucleotide
  modified_base 54: mod_base = OTHER; note = 2'-O-methyl ribonucleotide
  modified_base 55: mod_base = OTHER; note = 2'-O-methyl ribonucleotide
  modified_base 56: mod_base = OTHER; note = 2'-O-methyl ribonucleotide
  modified_base 57: mod_base = OTHER; note = 2'-O-methyl ribonucleotide
  modified_base 60: mod_base = OTHER; note = 2'-O-methyl ribonucleotide
  modified_base 61: mod_base = OTHER; note = 2'-O-methyl ribonucleotide
  modified_base 66: mod_base = OTHER; note = 2'-O-methyl ribonucleotide
  modified_base 67: mod_base = OTHER; note = 2'-O-methyl ribonucleotide
  modified_base 70: mod_base = OTHER; note = 2'-O-methyl ribonucleotide
  modified_base 71: mod_base = OTHER; note = 2'-O-methyl ribonucleotide
  modified_base 72: mod_base = OTHER; note = 2'-O-methyl ribonucleotide
  modified_base 73: mod_base = OTHER; note = 2'-O-methyl ribonucleotide
  modified_base 74: mod_base = OTHER; note = 2'-O-methyl ribonucleotide
  modified_base 75: mod_base = OTHER; note = 2'-O-methyl ribonucleotide
  modified_base 76: mod_base = OTHER; note = 2'-O-methyl ribonucleotide
  modified_base 77: mod_base = OTHER; note = 2'-O-methyl ribonucleotide
  modified_base 78: mod_base = OTHER; note = 2'-O-methyl ribonucleotide
  modified_base 79: mod_base = OTHER; note = 2'-O-methyl ribonucleotide
  modified_base 80: mod_base = OTHER; note = 2'-O-methyl ribonucleotide
  modified_base 81: mod_base = OTHER; note = 2'-O-methyl ribonucleotide
  modified_base 83: mod_base = OTHER; note = 2'-O-methyl ribonucleotide
  modified_base 84: mod_base = OTHER; note = 2'-O-methyl ribonucleotide
  modified_base 85: mod_base = OTHER; note = 2'-O-methyl ribonucleotide
  modified_base 86: mod_base = OTHER; note = 2'-O-methyl ribonucleotide
  modified_base 87: mod_base = OTHER; note = 2'-O-methyl ribonucleotide
  modified_base 88: mod_base = OTHER; note = 2'-O-methyl ribonucleotide
  modified_base 89: mod_base = OTHER; note = 2'-O-methyl ribonucleotide
  modified_base 90: mod_base = OTHER; note = 2'-O-methyl ribonucleotide
  modified_base 91: mod_base = OTHER; note = 2'-O-methyl ribonucleotide
  modified_base 92: mod_base = OTHER; note = 2'-O-methyl ribonucleotide
  modified_base 93: mod_base = OTHER; note = 2'-O-methyl ribonucleotide
  modified_base 94: mod_base = OTHER; note = 2'-O-methyl ribonucleotide
  modified_base 95: mod_base = OTHER; note = 2'-O-methyl ribonucleotide
  modified_base 96: mod_base = OTHER; note = 2'-O-methyl ribonucleotide
  modified_base 97: mod_base = OTHER; note = 2'-O-methyl ribonucleotide
  modified_base 98: mod_base = OTHER; note = 2'-O-methyl ribonucleotide
  modified_base 99: mod_base = OTHER; note = 2'-O-methyl ribonucleotide
  modified_base 100: mod_base = OTHER; note = 2'-O-methyl ribonucleotide
  modified_base 9: mod_base = OTHER; note = nebularine
  modified_base 57: mod_base = OTHER; note = nebularine
  modified_base 1..3: mod_base = OTHER; note = phosphorothioate linkage
  modified_base 97..100: mod_base = OTHER; note = phosphorothioate linkage

SEQ ID NO: 3182 - RNA, 100 nt, synthetic construct; identical to SEQ ID NO: 1905
  source 1..100: mol_type = other RNA
  modified_base 1: mod_base = OTHER; note = 2'-O-methyl ribonucleotide
  modified_base 2: mod_base = OTHER; note = 2'-O-methyl ribonucleotide
  modified_base 3: mod_base = OTHER; note = 2'-O-methyl ribonucleotide
  modified_base 21: mod_base = OTHER; note = 2'-O-methyl ribonucleotide
  modified_base 28: mod_base = OTHER; note = 2'-O-methyl ribonucleotide
  modified_base 29: mod_base = OTHER; note = 2'-O-methyl ribonucleotide
  modified_base 30: mod_base = OTHER; note = 2'-O-methyl ribonucleotide
  modified_base 31: mod_base = OTHER; note = 2'-O-methyl ribonucleotide
  modified_base 32: mod_base = OTHER; note = 2'-O-methyl ribonucleotide
  modified_base 33: mod_base = OTHER; note = 2'-O-methyl ribonucleotide
  modified_base 34: mod_base = OTHER; note = 2'-O-methyl ribonucleotide
  modified_base 35: mod_base = OTHER; note = 2'-O-methyl ribonucleotide
  modified_base 36: mod_base = OTHER; note = 2'-O-methyl ribonucleotide
  modified_base 37: mod_base = OTHER; note = 2'-O-methyl ribonucleotide
  modified_base 38: mod_base = OTHER; note = 2'-O-methyl ribonucleotide
  modified_base 39: mod_base = OTHER; note = 2'-O-methyl ribonucleotide
  modified_base 40: mod_base = OTHER; note = 2'-O-methyl ribonucleotide
  modified_base 41: mod_base = OTHER; note = 2'-O-methyl ribonucleotide
  modified_base 42: mod_base = OTHER; note = 2'-O-methyl ribonucleotide
  modified_base 46: mod_base = OTHER; note = 2'-O-methyl ribonucleotide
  modified_base 48: mod_base = OTHER; note = 2'-O-methyl ribonucleotide
  modified_base 50: mod_base = OTHER; note = 2'-O-methyl ribonucleotide
  modified_base 52: mod_base = OTHER; note = 2'-O-methyl ribonucleotide
  modified_base 53: mod_base = OTHER; note = 2'-O-methyl ribonucleotide
  modified_base 54: mod_base = OTHER; note = 2'-O-methyl ribonucleotide
  modified_base 55: mod_base = OTHER; note = 2'-O-methyl ribonucleotide
  modified_base 56: mod_base = OTHER; note = 2'-O-methyl ribonucleotide
  modified_base 57: mod_base = OTHER; note = 2'-O-methyl ribonucleotide
  modified_base 60: mod_base = OTHER; note = 2'-O-methyl ribonucleotide
  modified_base 61: mod_base = OTHER; note = 2'-O-methyl ribonucleotide
  modified_base 66: mod_base = OTHER; note = 2'-O-methyl ribonucleotide
  modified_base 67: mod_base = OTHER; note = 2'-O-methyl ribonucleotide
  modified_base 70: mod_base = OTHER; note = 2'-O-methyl ribonucleotide
  modified_base 71: mod_base = OTHER; note = 2'-O-methyl ribonucleotide
  modified_base 72: mod_base = OTHER; note = 2'-O-methyl ribonucleotide
  modified_base 73: mod_base = OTHER; note = 2'-O-methyl ribonucleotide
  modified_base 74: mod_base = OTHER; note = 2'-O-methyl ribonucleotide
  modified_base 75: mod_base = OTHER; note = 2'-O-methyl ribonucleotide
  modified_base 76: mod_base = OTHER; note = 2'-O-methyl ribonucleotide
  modified_base 77: mod_base = OTHER; note = 2'-O-methyl ribonucleotide
  modified_base 78: mod_base = OTHER; note = 2'-O-methyl ribonucleotide
  modified_base 79: mod_base = OTHER; note = 2'-O-methyl ribonucleotide
  modified_base 80: mod_base = OTHER; note = 2'-O-methyl ribonucleotide
  modified_base 81: mod_base = OTHER; note = 2'-O-methyl ribonucleotide
  modified_base 83: mod_base = OTHER; note = 2'-O-methyl ribonucleotide
  modified_base 84: mod_base = OTHER; note = 2'-O-methyl ribonucleotide
  modified_base 85: mod_base = OTHER; note = 2'-O-methyl ribonucleotide
  modified_base 86: mod_base = OTHER; note = 2'-O-methyl ribonucleotide
  modified_base 87: mod_base = OTHER; note = 2'-O-methyl ribonucleotide
  modified_base 88: mod_base = OTHER; note = 2'-O-methyl ribonucleotide
  modified_base 89: mod_base = OTHER; note = 2'-O-methyl ribonucleotide
  modified_base 90: mod_base = OTHER; note = 2'-O-methyl ribonucleotide
  modified_base 91: mod_base = OTHER; note = 2'-O-methyl ribonucleotide
  modified_base 92: mod_base = OTHER; note = 2'-O-methyl ribonucleotide
  modified_base 93: mod_base = OTHER; note = 2'-O-methyl ribonucleotide
  modified_base 94: mod_base = OTHER; note = 2'-O-methyl ribonucleotide
  modified_base 95: mod_base = OTHER; note = 2'-O-methyl ribonucleotide
  modified_base 96: mod_base = OTHER; note = 2'-O-methyl ribonucleotide
  modified_base 97: mod_base = OTHER; note = 2'-O-methyl ribonucleotide
  modified_base 98: mod_base = OTHER; note = 2'-O-methyl ribonucleotide
  modified_base 99: mod_base = OTHER; note = 2'-O-methyl ribonucleotide
  modified_base 100: mod_base = OTHER; note = 2'-O-methyl ribonucleotide
  modified_base 9: mod_base = OTHER; note = nebularine
  modified_base 14: mod_base = OTHER; note = nebularine
  modified_base 34: mod_base = OTHER; note = nebularine
  modified_base 1..4: mod_base = OTHER; note = phosphorothioate linkage
  modified_base 98..100: mod_base = OTHER; note = phosphorothioate linkage

SEQ ID NO: 3183 - RNA, 100 nt, synthetic construct; identical to SEQ ID NO: 1917
  source 1..100: mol_type = other RNA
  modified_base 1: mod_base = OTHER; note = 2'-O-methyl ribonucleotide
  modified_base 2: mod_base = OTHER; note = 2'-O-methyl ribonucleotide
  modified_base 3: mod_base = OTHER; note = 2'-O-methyl ribonucleotide
  modified_base 21: mod_base = OTHER; note = 2'-O-methyl ribonucleotide
  modified_base 28: mod_base = OTHER; note = 2'-O-methyl ribonucleotide
  modified_base 29: mod_base = OTHER; note = 2'-O-methyl ribonucleotide
  modified_base 30: mod_base = OTHER; note = 2'-O-methyl ribonucleotide
  modified_base 31: mod_base = OTHER; note = 2'-O-methyl ribonucleotide
  modified_base 32: mod_base = OTHER; note = 2'-O-methyl ribonucleotide
  modified_base 33: mod_base = OTHER; note = 2'-O-methyl ribonucleotide
  modified_base 34: mod_base = OTHER; note = 2'-O-methyl ribonucleotide
  modified_base 35: mod_base = OTHER; note = 2'-O-methyl ribonucleotide
  modified_base 36: mod_base = OTHER; note = 2'-O-methyl ribonucleotide
  modified_base 37: mod_base = OTHER; note = 2'-O-methyl ribonucleotide
  modified_base 38: mod_base = OTHER; note = 2'-O-methyl ribonucleotide
  modified_base 39: mod_base = OTHER; note = 2'-O-methyl ribonucleotide
  modified_base 40: mod_base = OTHER; note = 2'-O-methyl ribonucleotide
  modified_base 41: mod_base = OTHER; note = 2'-O-methyl ribonucleotide
  modified_base 42: mod_base = OTHER; note = 2'-O-methyl ribonucleotide
  modified_base 46: mod_base = OTHER; note = 2'-O-methyl ribonucleotide
  modified_base 48: mod_base = OTHER; note = 2'-O-methyl ribonucleotide
  modified_base 50: mod_base = OTHER; note = 2'-O-methyl ribonucleotide
  modified_base 52: mod_base = OTHER; note = 2'-O-methyl ribonucleotide
  modified_base 53: mod_base = OTHER; note = 2'-O-methyl ribonucleotide
  modified_base 54: mod_base = OTHER; note = 2'-O-methyl ribonucleotide
  modified_base 55: mod_base = OTHER; note = 2'-O-methyl ribonucleotide
  modified_base 56: mod_base = OTHER; note = 2'-O-methyl ribonucleotide
  modified_base 57: mod_base = OTHER; note = 2'-O-methyl ribonucleotide
  modified_base 60: mod_base = OTHER; note = 2'-O-methyl ribonucleotide
  modified_base 61: mod_base = OTHER; note = 2'-O-methyl ribonucleotide
  modified_base 66: mod_base = OTHER; note = 2'-O-methyl ribonucleotide
  modified_base 67: mod_base = OTHER; note = 2'-O-methyl ribonucleotide
  modified_base 70: mod_base = OTHER; note = 2'-O-methyl ribonucleotide
  modified_base 71: mod_base = OTHER; note = 2'-O-methyl ribonucleotide
  modified_base 72: mod_base = OTHER; note = 2'-O-methyl ribonucleotide
  modified_base 73: mod_base = OTHER; note = 2'-O-methyl ribonucleotide
  modified_base 74: mod_base = OTHER; note = 2'-O-methyl ribonucleotide
  modified_base 75: mod_base = OTHER; note = 2'-O-methyl ribonucleotide
  modified_base 76: mod_base = OTHER; note = 2'-O-methyl ribonucleotide
  modified_base 77: mod_base = OTHER; note = 2'-O-methyl ribonucleotide
  modified_base 78: mod_base = OTHER; note = 2'-O-methyl ribonucleotide
  modified_base 79: mod_base = OTHER; note = 2'-O-methyl ribonucleotide
  modified_base 80: mod_base = OTHER; note = 2'-O-methyl ribonucleotide
  modified_base 81: mod_base = OTHER; note = 2'-O-methyl ribonucleotide
  modified_base 83: mod_base = OTHER; note = 2'-O-methyl ribonucleotide
  modified_base 84: mod_base = OTHER; note = 2'-O-methyl ribonucleotide
  modified_base 85: mod_base = OTHER; note = 2'-O-methyl ribonucleotide
  modified_base 86: mod_base = OTHER; note = 2'-O-methyl ribonucleotide
  modified_base 87: mod_base = OTHER; note = 2'-O-methyl ribonucleotide
  modified_base 88: mod_base = OTHER; note = 2'-O-methyl ribonucleotide
  modified_base 89: mod_base = OTHER; note = 2'-O-methyl ribonucleotide
  modified_base 90: mod_base = OTHER; note = 2'-O-methyl ribonucleotide
  modified_base 91: mod_base = OTHER; note = 2'-O-methyl ribonucleotide
  modified_base 92: mod_base = OTHER; note = 2'-O-methyl ribonucleotide
  modified_base 93: mod_base = OTHER; note = 2'-O-methyl ribonucleotide
  modified_base 94: mod_base = OTHER; note = 2'-O-methyl ribonucleotide
  modified_base 95: mod_base = OTHER; note = 2'-O-methyl ribonucleotide
  modified_base 96: mod_base = OTHER; note = 2'-O-methyl ribonucleotide
  modified_base 97: mod_base = OTHER; note = 2'-O-methyl ribonucleotide
  modified_base 98: mod_base = OTHER; note = 2'-O-methyl ribonucleotide
  modified_base 99: mod_base = OTHER; note = 2'-O-methyl ribonucleotide
  modified_base 100: mod_base = OTHER; note = 2'-O-methyl ribonucleotide
  modified_base 14: mod_base = OTHER; note = nebularine
  modified_base 57: mod_base = OTHER; note = nebularine
  modified_base 1..4: mod_base = OTHER; note = phosphorothioate linkage
  modified_base 98..100: mod_base = OTHER; note = phosphorothioate linkage

SEQ ID NO: 3184 - RNA, 100 nt, synthetic construct; identical to SEQ ID NO: 1915
  source 1..100: mol_type = other RNA
  modified_base 1: mod_base = OTHER; note = 2'-O-methyl ribonucleotide
  modified_base 2: mod_base = OTHER; note = 2'-O-methyl ribonucleotide
  modified_base 3: mod_base = OTHER; note = 2'-O-methyl ribonucleotide
  modified_base 21: mod_base = OTHER; note = 2'-O-methyl ribonucleotide
  modified_base 28: mod_base = OTHER; note = 2'-O-methyl ribonucleotide
  modified_base 29: mod_base = OTHER; note = 2'-O-methyl ribonucleotide
  modified_base 30: mod_base = OTHER; note = 2'-O-methyl ribonucleotide
  modified_base 31: mod_base = OTHER; note = 2'-O-methyl ribonucleotide
  modified_base 32: mod_base = OTHER; note = 2'-O-methyl ribonucleotide
  modified_base 33: mod_base = OTHER; note = 2'-O-methyl ribonucleotide
  modified_base 34: mod_base = OTHER; note = 2'-O-methyl ribonucleotide
  modified_base 35: mod_base = OTHER; note = 2'-O-methyl ribonucleotide
  modified_base 36: mod_base = OTHER; note = 2'-O-methyl ribonucleotide
  modified_base 37: mod_base = OTHER; note = 2'-O-methyl ribonucleotide
  modified_base 38: mod_base = OTHER; note = 2'-O-methyl ribonucleotide
  modified_base 39: mod_base = OTHER; note = 2'-O-methyl ribonucleotide
  modified_base 40: mod_base = OTHER; note = 2'-O-methyl ribonucleotide
  modified_base 41: mod_base = OTHER; note = 2'-O-methyl ribonucleotide
  modified_base 42: mod_base = OTHER; note = 2'-O-methyl ribonucleotide
  modified_base 46: mod_base = OTHER; note = 2'-O-methyl ribonucleotide
  modified_base 48: mod_base = OTHER; note = 2'-O-methyl ribonucleotide
  modified_base 50: mod_base = OTHER; note = 2'-O-methyl ribonucleotide
  modified_base 52: mod_base = OTHER; note = 2'-O-methyl ribonucleotide
  modified_base 53: mod_base = OTHER; note = 2'-O-methyl ribonucleotide
  modified_base 54: mod_base = OTHER; note = 2'-O-methyl ribonucleotide
  modified_base 55: mod_base = OTHER; note = 2'-O-methyl ribonucleotide
  modified_base 56: mod_base = OTHER; note = 2'-O-methyl ribonucleotide
  modified_base 57: mod_base = OTHER; note = 2'-O-methyl ribonucleotide
  modified_base 60: mod_base = OTHER; note = 2'-O-methyl ribonucleotide
  modified_base 61: mod_base = OTHER; note = 2'-O-methyl ribonucleotide
  modified_base 66: mod_base = OTHER; note = 2'-O-methyl ribonucleotide
  modified_base 67: mod_base = OTHER; note = 2'-O-methyl ribonucleotide
  modified_base 70: mod_base = OTHER; note = 2'-O-methyl ribonucleotide
  modified_base 71: mod_base = OTHER; note = 2'-O-methyl ribonucleotide
  modified_base 72: mod_base = OTHER; note = 2'-O-methyl ribonucleotide
  modified_base 73: mod_base = OTHER; note = 2'-O-methyl ribonucleotide
  modified_base 74: mod_base = OTHER; note = 2'-O-methyl ribonucleotide
  modified_base 75: mod_base = OTHER; note = 2'-O-methyl ribonucleotide
  modified_base 76: mod_base = OTHER; note = 2'-O-methyl ribonucleotide
  modified_base 77: mod_base = OTHER; note = 2'-O-methyl ribonucleotide
  modified_base 78: mod_base = OTHER; note = 2'-O-methyl ribonucleotide
  modified_base 79: mod_base = OTHER; note = 2'-O-methyl ribonucleotide
  modified_base 80: mod_base = OTHER; note = 2'-O-methyl ribonucleotide
  modified_base 81: mod_base = OTHER; note = 2'-O-methyl ribonucleotide
  modified_base 83: mod_base = OTHER; note = 2'-O-methyl ribonucleotide
  modified_base 84: mod_base = OTHER; note = 2'-O-methyl ribonucleotide
  modified_base 85: mod_base = OTHER; note = 2'-O-methyl ribonucleotide
  modified_base 86: mod_base = OTHER; note = 2'-O-methyl ribonucleotide
  modified_base 87: mod_base = OTHER; note = 2'-O-methyl ribonucleotide
  modified_base 88: mod_base = OTHER; note = 2'-O-methyl ribonucleotide
  modified_base 89: mod_base = OTHER; note = 2'-O-methyl ribonucleotide
  modified_base 90: mod_base = OTHER; note = 2'-O-methyl ribonucleotide
  modified_base 91: mod_base = OTHER; note = 2'-O-methyl ribonucleotide
  modified_base 92: mod_base = OTHER; note = 2'-O-methyl ribonucleotide
  modified_base 93: mod_base = OTHER; note = 2'-O-methyl ribonucleotide
  modified_base 94: mod_base = OTHER; note = 2'-O-methyl ribonucleotide
  modified_base 95: mod_base = OTHER; note = 2'-O-methyl ribonucleotide
  modified_base 96: mod_base = OTHER; note = 2'-O-methyl ribonucleotide
  modified_base 97: mod_base = OTHER; note = 2'-O-methyl ribonucleotide
  modified_base 98: mod_base = OTHER; note = 2'-O-methyl ribonucleotide
  modified_base 99: mod_base = OTHER; note = 2'-O-methyl ribonucleotide
  modified_base 100: mod_base = OTHER; note = 2'-O-methyl ribonucleotide
  modified_base 14: mod_base = OTHER; note = nebularine
  modified_base 34: mod_base = OTHER; note = nebularine
  modified_base 1..4: mod_base = OTHER; note = phosphorothioate linkage
  modified_base 98..100: mod_base = OTHER; note = phosphorothioate linkage

SEQ ID NO: 3185 - RNA, 100 nt, synthetic construct; identical to SEQ ID NO: 1911
  source 1..100: mol_type = other RNA
  modified_base 1: mod_base = OTHER; note = 2'-O-methyl ribonucleotide
  modified_base 2: mod_base = OTHER; note = 2'-O-methyl ribonucleotide
  modified_base 3: mod_base = OTHER; note = 2'-O-methyl ribonucleotide
  modified_base 21: mod_base = OTHER; note = 2'-O-methyl ribonucleotide
  modified_base 28: mod_base = OTHER; note = 2'-O-methyl ribonucleotide
  modified_base 29: mod_base = OTHER; note = 2'-O-methyl ribonucleotide
  modified_base 30: mod_base = OTHER; note = 2'-O-methyl ribonucleotide
  modified_base 31: mod_base = OTHER; note = 2'-O-methyl ribonucleotide
  modified_base 32: mod_base = OTHER; note = 2'-O-methyl ribonucleotide
  modified_base 33: mod_base = OTHER; note = 2'-O-methyl ribonucleotide
  modified_base 34: mod_base = OTHER; note = 2'-O-methyl ribonucleotide
  modified_base 35: mod_base = OTHER; note = 2'-O-methyl ribonucleotide
  modified_base 36: mod_base = OTHER; note = 2'-O-methyl ribonucleotide
  modified_base 37: mod_base = OTHER; note = 2'-O-methyl ribonucleotide
  modified_base 38: mod_base = OTHER; note = 2'-O-methyl ribonucleotide
  modified_base 39: mod_base = OTHER; note = 2'-O-methyl ribonucleotide
  modified_base 40: mod_base = OTHER; note = 2'-O-methyl ribonucleotide
  modified_base 41: mod_base = OTHER; note = 2'-O-methyl ribonucleotide
  modified_base 42: mod_base = OTHER; note = 2'-O-methyl ribonucleotide
  modified_base 46: mod_base = OTHER; note = 2'-O-methyl ribonucleotide
  modified_base 48: mod_base = OTHER; note = 2'-O-methyl ribonucleotide
  modified_base 50: mod_base = OTHER; note = 2'-O-methyl ribonucleotide
  modified_base 52: mod_base = OTHER; note = 2'-O-methyl ribonucleotide
  modified_base 53: mod_base = OTHER; note = 2'-O-methyl ribonucleotide
  modified_base 54: mod_base = OTHER; note = 2'-O-methyl ribonucleotide
  modified_base 55: mod_base = OTHER; note = 2'-O-methyl ribonucleotide
  modified_base 56: mod_base = OTHER; note = 2'-O-methyl ribonucleotide
  modified_base 57: mod_base = OTHER; note = 2'-O-methyl ribonucleotide
  modified_base 60: mod_base = OTHER; note = 2'-O-methyl ribonucleotide
  modified_base 61: mod_base = OTHER; note = 2'-O-methyl ribonucleotide
  modified_base 66: mod_base = OTHER; note = 2'-O-methyl ribonucleotide
  modified_base 67: mod_base = OTHER; note = 2'-O-methyl ribonucleotide
  modified_base 70: mod_base = OTHER; note = 2'-O-methyl ribonucleotide
  modified_base 71: mod_base = OTHER; note = 2'-O-methyl ribonucleotide
  modified_base 72: mod_base = OTHER; note = 2'-O-methyl ribonucleotide
  modified_base 73: mod_base = OTHER; note = 2'-O-methyl ribonucleotide
  modified_base 74: mod_base = OTHER; note = 2'-O-methyl ribonucleotide
  modified_base 75: mod_base = OTHER; note = 2'-O-methyl ribonucleotide
  modified_base 76: mod_base = OTHER; note = 2'-O-methyl ribonucleotide
  modified_base 77: mod_base = OTHER; note = 2'-O-methyl ribonucleotide
  modified_base 78: mod_base = OTHER; note = 2'-O-methyl ribonucleotide
  modified_base 79: mod_base = OTHER; note = 2'-O-methyl ribonucleotide
  modified_base 80: mod_base = OTHER; note = 2'-O-methyl ribonucleotide
  modified_base 81: mod_base = OTHER; note = 2'-O-methyl ribonucleotide
  modified_base 83: mod_base = OTHER; note = 2'-O-methyl ribonucleotide
  modified_base 84: mod_base = OTHER; note = 2'-O-methyl ribonucleotide
  modified_base 85: mod_base = OTHER; note = 2'-O-methyl ribonucleotide
  modified_base 86: mod_base = OTHER; note = 2'-O-methyl ribonucleotide
  modified_base 87: mod_base = OTHER; note = 2'-O-methyl ribonucleotide
  modified_base 88: mod_base = OTHER; note = 2'-O-methyl ribonucleotide
  modified_base 89: mod_base = OTHER; note = 2'-O-methyl ribonucleotide
  modified_base 90: mod_base = OTHER; note = 2'-O-methyl ribonucleotide
  modified_base 91: mod_base = OTHER; note = 2'-O-methyl ribonucleotide
  modified_base 92: mod_base = OTHER; note = 2'-O-methyl ribonucleotide
  modified_base 93: mod_base = OTHER; note = 2'-O-methyl ribonucleotide
  modified_base 94: mod_base = OTHER; note = 2'-O-methyl ribonucleotide
  modified_base 95: mod_base = OTHER; note = 2'-O-methyl ribonucleotide
  modified_base 96: mod_base = OTHER; note = 2'-O-methyl ribonucleotide
  modified_base 97: mod_base = OTHER; note = 2'-O-methyl ribonucleotide
  modified_base 98: mod_base = OTHER; note = 2'-O-methyl ribonucleotide
  modified_base 99: mod_base = OTHER; note = 2'-O-methyl ribonucleotide
  modified_base 100: mod_base = OTHER; note = 2'-O-methyl ribonucleotide
  modified_base 9: mod_base = OTHER; note = nebularine
  modified_base 57: mod_base = OTHER; note = nebularine
  modified_base 1..4: mod_base = OTHER; note = phosphorothioate linkage
  modified_base 98..100: mod_base = OTHER; note = phosphorothioate linkage

SEQ ID NO: 3186 - RNA, 100 nt, synthetic construct; identical to SEQ ID NO: 1905
  source 1..100: mol_type = other RNA
  modified_base 1: mod_base = OTHER; note = 2'-O-methyl ribonucleotide
  modified_base 2: mod_base = OTHER; note = 2'-O-methyl ribonucleotide
  modified_base 3: mod_base = OTHER; note = 2'-O-methyl ribonucleotide
  modified_base 21: mod_base = OTHER; note = 2'-O-methyl ribonucleotide
  modified_base 28: mod_base = OTHER; note = 2'-O-methyl ribonucleotide
  modified_base 29: mod_base = OTHER; note = 2'-O-methyl ribonucleotide
  modified_base 30: mod_base = OTHER; note = 2'-O-methyl ribonucleotide
  modified_base 31: mod_base = OTHER; note = 2'-O-methyl ribonucleotide
  modified_base 32: mod_base = OTHER; note = 2'-O-methyl ribonucleotide
  modified_base 33: mod_base = OTHER; note = 2'-O-methyl ribonucleotide
  modified_base 34: mod_base = OTHER; note = 2'-O-methyl ribonucleotide
  modified_base 35: mod_base = OTHER; note = 2'-O-methyl ribonucleotide
  modified_base 36: mod_base = OTHER; note = 2'-O-methyl ribonucleotide
  modified_base 37: mod_base = OTHER; note = 2'-O-methyl ribonucleotide
  modified_base 38: mod_base = OTHER; note = 2'-O-methyl ribonucleotide
  modified_base 39: mod_base = OTHER; note = 2'-O-methyl ribonucleotide
  modified_base 40: mod_base = OTHER; note = 2'-O-methyl ribonucleotide
  modified_base 41: mod_base = OTHER; note = 2'-O-methyl ribonucleotide
  modified_base 42: mod_base = OTHER; note = 2'-O-methyl ribonucleotide
  modified_base 46: mod_base = OTHER; note = 2'-O-methyl ribonucleotide
  modified_base 48: mod_base = OTHER; note = 2'-O-methyl ribonucleotide
  modified_base 50: mod_base = OTHER; note = 2'-O-methyl ribonucleotide
  modified_base 52: mod_base = OTHER; note = 2'-O-methyl ribonucleotide
  modified_base 53: mod_base = OTHER; note = 2'-O-methyl ribonucleotide
  modified_base 54: mod_base = OTHER; note = 2'-O-methyl ribonucleotide
  modified_base 55: mod_base = OTHER; note = 2'-O-methyl ribonucleotide
  modified_base 56: mod_base = OTHER; note = 2'-O-methyl ribonucleotide
  modified_base 57: mod_base = OTHER; note = 2'-O-methyl ribonucleotide
  modified_base 60: mod_base = OTHER; note = 2'-O-methyl ribonucleotide
  modified_base 61: mod_base = OTHER; note = 2'-O-methyl ribonucleotide
  modified_base 66: mod_base = OTHER; note = 2'-O-methyl ribonucleotide
  modified_base 67: mod_base = OTHER; note = 2'-O-methyl ribonucleotide
  modified_base 70: mod_base = OTHER; note = 2'-O-methyl ribonucleotide
  modified_base 71: mod_base = OTHER; note = 2'-O-methyl ribonucleotide
  modified_base 72: mod_base = OTHER; note = 2'-O-methyl ribonucleotide
  modified_base 73: mod_base = OTHER; note = 2'-O-methyl ribonucleotide
  modified_base 74: mod_base = OTHER; note = 2'-O-methyl ribonucleotide
  modified_base 75: mod_base = OTHER; note = 2'-O-methyl ribonucleotide
  modified_base 76: mod_base = OTHER; note = 2'-O-methyl ribonucleotide
  modified_base 77: mod_base = OTHER; note = 2'-O-methyl ribonucleotide
  modified_base 78: mod_base = OTHER; note = 2'-O-methyl ribonucleotide
  modified_base 79: mod_base = OTHER; note = 2'-O-methyl ribonucleotide
  modified_base 80: mod_base = OTHER; note = 2'-O-methyl ribonucleotide
  modified_base 81: mod_base = OTHER; note = 2'-O-methyl ribonucleotide
  modified_base 83: mod_base = OTHER; note = 2'-O-methyl ribonucleotide
  modified_base 84: mod_base = OTHER; note = 2'-O-methyl ribonucleotide
  modified_base 85: mod_base = OTHER; note = 2'-O-methyl ribonucleotide
  modified_base 86: mod_base = OTHER; note = 2'-O-methyl ribonucleotide
  modified_base 87: mod_base = OTHER; note = 2'-O-methyl ribonucleotide
  modified_base 88: mod_base = OTHER; note = 2'-O-methyl ribonucleotide
  modified_base 89: mod_base = OTHER; note = 2'-O-methyl ribonucleotide
  modified_base 90: mod_base = OTHER; note = 2'-O-methyl ribonucleotide
  modified_base 91: mod_base = OTHER; note = 2'-O-methyl ribonucleotide
  modified_base 92: mod_base = OTHER; note = 2'-O-methyl ribonucleotide
  modified_base 93: mod_base = OTHER; note = 2'-O-methyl ribonucleotide
  modified_base 94: mod_base = OTHER; note = 2'-O-methyl ribonucleotide
  modified_base 95: mod_base = OTHER; note = 2'-O-methyl ribonucleotide
  modified_base 96: mod_base = OTHER; note = 2'-O-methyl ribonucleotide
  modified_base 97: mod_base = OTHER; note = 2'-O-methyl ribonucleotide
  modified_base 98: mod_base = OTHER; note = 2'-O-methyl ribonucleotide
  modified_base 99: mod_base = OTHER; note = 2'-O-methyl ribonucleotide
  modified_base 100: mod_base = OTHER; note = 2'-O-methyl ribonucleotide
  modified_base 9: mod_base = OTHER; note = nebularine
  modified_base 14: mod_base = OTHER; note = nebularine
  modified_base 34: mod_base = OTHER; note = nebularine
  modified_base 1..3: mod_base = OTHER; note = phosphorothioate linkage
  modified_base 98..100: mod_base = OTHER; note = phosphorothioate linkage

SEQ ID NO: 3187 - RNA, 100 nt, synthetic construct; identical to SEQ ID NO: 1917
  source 1..100: mol_type = other RNA
  modified_base 1: mod_base = OTHER; note = 2'-O-methyl ribonucleotide
  modified_base 2: mod_base = OTHER; note = 2'-O-methyl ribonucleotide
  modified_base 3: mod_base = OTHER; note = 2'-O-methyl ribonucleotide
  modified_base 21: mod_base = OTHER; note = 2'-O-methyl ribonucleotide
  modified_base 28: mod_base = OTHER; note = 2'-O-methyl ribonucleotide
  modified_base 29: mod_base = OTHER; note = 2'-O-methyl ribonucleotide
  modified_base 30: mod_base = OTHER; note = 2'-O-methyl ribonucleotide
  modified_base 31: mod_base = OTHER; note = 2'-O-methyl ribonucleotide
  modified_base 32: mod_base = OTHER; note = 2'-O-methyl ribonucleotide
  modified_base 33: mod_base = OTHER; note = 2'-O-methyl ribonucleotide
  modified_base 34: mod_base = OTHER; note = 2'-O-methyl ribonucleotide
  modified_base 35: mod_base = OTHER; note = 2'-O-methyl ribonucleotide
  modified_base 36: mod_base = OTHER; note = 2'-O-methyl ribonucleotide
  modified_base 37: mod_base = OTHER; note = 2'-O-methyl ribonucleotide
  modified_base 38: mod_base = OTHER; note = 2'-O-methyl ribonucleotide
  modified_base 39: mod_base = OTHER; note = 2'-O-methyl ribonucleotide
  modified_base 40: mod_base = OTHER; note = 2'-O-methyl ribonucleotide
  modified_base 41: mod_base = OTHER; note = 2'-O-methyl ribonucleotide
  modified_base 42: mod_base = OTHER; note = 2'-O-methyl ribonucleotide
  modified_base 46: mod_base = OTHER; note = 2'-O-methyl ribonucleotide
  modified_base 48: mod_base = OTHER; note = 2'-O-methyl ribonucleotide
  modified_base 50: mod_base = OTHER; note = 2'-O-methyl ribonucleotide
  modified_base 52: mod_base = OTHER; note = 2'-O-methyl ribonucleotide
  modified_base 53: mod_base = OTHER; note = 2'-O-methyl ribonucleotide
  modified_base 54: mod_base = OTHER; note = 2'-O-methyl ribonucleotide
  modified_base 55: mod_base = OTHER; note = 2'-O-methyl ribonucleotide
  modified_base 56: mod_base = OTHER; note = 2'-O-methyl ribonucleotide
  modified_base 57: mod_base = OTHER; note = 2'-O-methyl ribonucleotide
  modified_base 60: mod_base = OTHER; note = 2'-O-methyl ribonucleotide
  modified_base 61: mod_base = OTHER; note = 2'-O-methyl ribonucleotide
  modified_base 66: mod_base = OTHER; note = 2'-O-methyl ribonucleotide
  modified_base 67: mod_base = OTHER; note = 2'-O-methyl ribonucleotide
  modified_base 70: mod_base = OTHER; note = 2'-O-methyl ribonucleotide
  modified_base 71: mod_base = OTHER; note = 2'-O-methyl ribonucleotide
  modified_base 72: mod_base = OTHER; note = 2'-O-methyl ribonucleotide
  modified_base 73: mod_base = OTHER; note = 2'-O-methyl ribonucleotide
  modified_base 74: mod_base = OTHER; note = 2'-O-methyl ribonucleotide
  modified_base 75: mod_base = OTHER; note = 2'-O-methyl ribonucleotide
  modified_base 76: mod_base = OTHER; note = 2'-O-methyl ribonucleotide
  modified_base 77: mod_base = OTHER; note = 2'-O-methyl ribonucleotide
  modified_base 78: mod_base = OTHER; note = 2'-O-methyl ribonucleotide
  modified_base 79: mod_base = OTHER; note = 2'-O-methyl ribonucleotide
  modified_base 80: mod_base = OTHER; note = 2'-O-methyl ribonucleotide
  modified_base 81: mod_base = OTHER; note = 2'-O-methyl ribonucleotide
  modified_base 83: mod_base = OTHER; note = 2'-O-methyl ribonucleotide
  modified_base 84: mod_base = OTHER; note = 2'-O-methyl ribonucleotide
  modified_base 85: mod_base = OTHER; note = 2'-O-methyl ribonucleotide
  modified_base 86: mod_base = OTHER; note = 2'-O-methyl ribonucleotide
  modified_base 87: mod_base = OTHER; note = 2'-O-methyl ribonucleotide
  modified_base 88: mod_base = OTHER; note = 2'-O-methyl ribonucleotide
  modified_base 89: mod_base = OTHER; note = 2'-O-methyl ribonucleotide
  modified_base 90: mod_base = OTHER; note = 2'-O-methyl ribonucleotide
  modified_base 91: mod_base = OTHER; note = 2'-O-methyl ribonucleotide
  modified_base 92: mod_base = OTHER; note = 2'-O-methyl ribonucleotide
  modified_base 93: mod_base = OTHER; note = 2'-O-methyl ribonucleotide
  modified_base 94: mod_base = OTHER; note = 2'-O-methyl ribonucleotide
  modified_base 95: mod_base = OTHER; note = 2'-O-methyl ribonucleotide
  modified_base 96: mod_base = OTHER; note = 2'-O-methyl ribonucleotide
  modified_base 97: mod_base = OTHER; note = 2'-O-methyl ribonucleotide
  modified_base 98: mod_base = OTHER; note = 2'-O-methyl ribonucleotide
  modified_base 99: mod_base = OTHER; note = 2'-O-methyl ribonucleotide
  modified_base 100: mod_base = OTHER; note = 2'-O-methyl ribonucleotide
  modified_base 14: mod_base = OTHER; note = nebularine
  modified_base 57: mod_base = OTHER; note = nebularine
  modified_base 1..3: mod_base = OTHER; note = phosphorothioate linkage
  modified_base 98..100: mod_base = OTHER; note = phosphorothioate linkage

SEQ ID NO: 3188 - RNA, 100 nt, synthetic construct; identical to SEQ ID NO: 1915
  source 1..100: mol_type = other RNA
  modified_base 1: mod_base = OTHER; note = 2'-O-methyl ribonucleotide
  modified_base 2: mod_base = OTHER; note = 2'-O-methyl ribonucleotide
  modified_base 3: mod_base = OTHER; note = 2'-O-methyl ribonucleotide
  modified_base 21: mod_base = OTHER; note = 2'-O-methyl ribonucleotide
  modified_base 28: mod_base = OTHER; note = 2'-O-methyl ribonucleotide
  modified_base 29: mod_base = OTHER; note = 2'-O-methyl ribonucleotide
  modified_base 30: mod_base = OTHER; note = 2'-O-methyl ribonucleotide
  modified_base 31: mod_base = OTHER; note = 2'-O-methyl ribonucleotide
  modified_base 32: mod_base = OTHER; note = 2'-O-methyl ribonucleotide
  modified_base 33: mod_base = OTHER; note = 2'-O-methyl ribonucleotide
  modified_base 34: mod_base = OTHER; note = 2'-O-methyl ribonucleotide
  modified_base 35: mod_base = OTHER; note = 2'-O-methyl ribonucleotide
  modified_base 36: mod_base = OTHER; note = 2'-O-methyl ribonucleotide
  modified_base 37: mod_base = OTHER; note = 2'-O-methyl ribonucleotide
  modified_base 38: mod_base = OTHER; note = 2'-O-methyl ribonucleotide
  modified_base 39: mod_base = OTHER; note = 2'-O-methyl ribonucleotide
  modified_base 40: mod_base = OTHER; note = 2'-O-methyl ribonucleotide
  modified_base 41: mod_base = OTHER; note = 2'-O-methyl ribonucleotide
  modified_base 42: mod_base = OTHER; note = 2'-O-methyl ribonucleotide
  modified_base 46: mod_base = OTHER; note = 2'-O-methyl ribonucleotide
  modified_base 48: mod_base = OTHER; note = 2'-O-methyl ribonucleotide
  modified_base 50: mod_base = OTHER; note = 2'-O-methyl ribonucleotide
  modified_base 52: mod_base = OTHER; note = 2'-O-methyl ribonucleotide
  modified_base 53: mod_base = OTHER; note = 2'-O-methyl ribonucleotide
  modified_base 54: mod_base = OTHER; note = 2'-O-methyl ribonucleotide
  modified_base 55: mod_base = OTHER; note = 2'-O-methyl ribonucleotide
  modified_base 56: mod_base = OTHER; note = 2'-O-methyl ribonucleotide
  modified_base 57: mod_base = OTHER; note = 2'-O-methyl ribonucleotide
  modified_base 60: mod_base = OTHER; note = 2'-O-methyl ribonucleotide
  modified_base 61: mod_base = OTHER; note = 2'-O-methyl ribonucleotide
  modified_base 66: mod_base = OTHER; note = 2'-O-methyl ribonucleotide
  modified_base 67: mod_base = OTHER; note = 2'-O-methyl ribonucleotide
  modified_base 70: mod_base = OTHER; note = 2'-O-methyl ribonucleotide
  modified_base 71: mod_base = OTHER; note = 2'-O-methyl ribonucleotide
  modified_base 72: mod_base = OTHER; note = 2'-O-methyl ribonucleotide
  modified_base 73: mod_base = OTHER; note = 2'-O-methyl ribonucleotide
  modified_base 74: mod_base = OTHER; note = 2'-O-methyl ribonucleotide
  modified_base 75: mod_base = OTHER; note = 2'-O-methyl ribonucleotide
  modified_base 76: mod_base = OTHER; note = 2'-O-methyl ribonucleotide
  modified_base 77: mod_base = OTHER; note = 2'-O-methyl ribonucleotide
  modified_base 78: mod_base = OTHER; note = 2'-O-methyl ribonucleotide
  modified_base 79: mod_base = OTHER; note = 2'-O-methyl ribonucleotide
  modified_base 80: mod_base = OTHER; note = 2'-O-methyl ribonucleotide
  modified_base 81: mod_base = OTHER; note = 2'-O-methyl ribonucleotide
  modified_base 83: mod_base = OTHER; note = 2'-O-methyl ribonucleotide
  modified_base 84: mod_base = OTHER; note = 2'-O-methyl ribonucleotide
  modified_base 85: mod_base = OTHER; note = 2'-O-methyl ribonucleotide
  modified_base 86: mod_base = OTHER; note = 2'-O-methyl ribonucleotide
  modified_base 87: mod_base = OTHER; note = 2'-O-methyl ribonucleotide
  modified_base 88: mod_base = OTHER; note = 2'-O-methyl ribonucleotide
  modified_base 89: mod_base = OTHER; note = 2'-O-methyl ribonucleotide
  modified_base 90: mod_base = OTHER; note = 2'-O-methyl ribonucleotide
  modified_base 91: mod_base = OTHER; note = 2'-O-methyl ribonucleotide
  modified_base 92: mod_base = OTHER; note = 2'-O-methyl ribonucleotide
  modified_base 93: mod_base = OTHER; note = 2'-O-methyl ribonucleotide
  modified_base 94: mod_base = OTHER; note = 2'-O-methyl ribonucleotide
  modified_base 95: mod_base = OTHER; note = 2'-O-methyl ribonucleotide
  modified_base 96: mod_base = OTHER; note = 2'-O-methyl ribonucleotide
  modified_base 97: mod_base = OTHER; note = 2'-O-methyl ribonucleotide
  modified_base 98: mod_base = OTHER; note = 2'-O-methyl ribonucleotide
  modified_base 99: mod_base = OTHER; note = 2'-O-methyl ribonucleotide
  modified_base 100: mod_base = OTHER; note = 2'-O-methyl ribonucleotide
  modified_base 14: mod_base = OTHER; note = nebularine
  modified_base 34: mod_base = OTHER; note = nebularine
  modified_base 1..3: mod_base = OTHER; note = phosphorothioate linkage
  modified_base 98..100: mod_base = OTHER; note = phosphorothioate linkage

SEQ ID NO: 3189 - RNA, 100 nt, synthetic construct; identical to SEQ ID NO: 1911
  source 1..100: mol_type = other RNA
  modified_base 1: mod_base = OTHER; note = 2'-O-methyl ribonucleotide
  modified_base 2: mod_base = OTHER; note = 2'-O-methyl ribonucleotide
  modified_base 3: mod_base = OTHER; note = 2'-O-methyl ribonucleotide
  modified_base 21: mod_base = OTHER; note = 2'-O-methyl ribonucleotide
  modified_base 28: mod_base = OTHER; note = 2'-O-methyl ribonucleotide
  modified_base 29: mod_base = OTHER; note = 2'-O-methyl ribonucleotide
  modified_base 30: mod_base = OTHER; note = 2'-O-methyl ribonucleotide
  modified_base 31: mod_base = OTHER; note = 2'-O-methyl ribonucleotide
  modified_base 32: mod_base = OTHER; note = 2'-O-methyl ribonucleotide
  modified_base 33: mod_base = OTHER; note = 2'-O-methyl ribonucleotide
  modified_base 34: mod_base = OTHER; note = 2'-O-methyl ribonucleotide
  modified_base 35: mod_base = OTHER; note = 2'-O-methyl ribonucleotide
  modified_base 36: mod_base = OTHER; note = 2'-O-methyl ribonucleotide
  modified_base 37: mod_base = OTHER; note = 2'-O-methyl ribonucleotide
  modified_base 38: mod_base = OTHER; note = 2'-O-methyl ribonucleotide
  modified_base 39: mod_base = OTHER; note = 2'-O-methyl ribonucleotide
  modified_base 40: mod_base = OTHER; note = 2'-O-methyl ribonucleotide
  modified_base 41: mod_base = OTHER; note = 2'-O-methyl ribonucleotide
  modified_base 42: mod_base = OTHER; note = 2'-O-methyl ribonucleotide
  modified_base 46: mod_base = OTHER; note = 2'-O-methyl ribonucleotide
  modified_base 48: mod_base = OTHER; note = 2'-O-methyl ribonucleotide
  modified_base 50: mod_base = OTHER; note = 2'-O-methyl ribonucleotide
  modified_base 52: mod_base = OTHER; note = 2'-O-methyl ribonucleotide
  modified_base 53: mod_base = OTHER; note = 2'-O-methyl ribonucleotide
  modified_base 54: mod_base = OTHER; note = 2'-O-methyl ribonucleotide
  modified_base 55: mod_base = OTHER; note = 2'-O-methyl ribonucleotide
  modified_base 56: mod_base = OTHER; note = 2'-O-methyl ribonucleotide
  modified_base 57: mod_base = OTHER; note = 2'-O-methyl ribonucleotide
  modified_base 60: mod_base = OTHER; note = 2'-O-methyl ribonucleotide
  modified_base 61: mod_base = OTHER; note = 2'-O-methyl ribonucleotide
  modified_base 66: mod_base = OTHER; note = 2'-O-methyl ribonucleotide
  modified_base 67: mod_base = OTHER; note = 2'-O-methyl ribonucleotide
  modified_base 70: mod_base = OTHER; note = 2'-O-methyl ribonucleotide
  modified_base 71: mod_base = OTHER; note = 2'-O-methyl ribonucleotide
  modified_base 72: mod_base = OTHER; note = 2'-O-methyl ribonucleotide
  modified_base 73: mod_base = OTHER; note = 2'-O-methyl ribonucleotide
  modified_base 74: mod_base = OTHER; note = 2'-O-methyl ribonucleotide
  modified_base 75: mod_base = OTHER; note = 2'-O-methyl ribonucleotide
  modified_base 76: mod_base = OTHER; note = 2'-O-methyl ribonucleotide
  modified_base 77: mod_base = OTHER; note = 2'-O-methyl ribonucleotide
  modified_base 78: mod_base = OTHER; note = 2'-O-methyl ribonucleotide
  modified_base 79: mod_base = OTHER; note = 2'-O-methyl ribonucleotide
  modified_base 80: mod_base = OTHER; note = 2'-O-methyl ribonucleotide
  modified_base 81: mod_base = OTHER; note = 2'-O-methyl ribonucleotide
  modified_base 83: mod_base = OTHER; note = 2'-O-methyl ribonucleotide
  modified_base 84: mod_base = OTHER; note = 2'-O-methyl ribonucleotide
  modified_base 85: mod_base = OTHER; note = 2'-O-methyl ribonucleotide
  modified_base 86: mod_base = OTHER; note = 2'-O-methyl ribonucleotide
  modified_base 87: mod_base = OTHER; note = 2'-O-methyl ribonucleotide
  modified_base 88: mod_base = OTHER; note = 2'-O-methyl ribonucleotide
  modified_base 89: mod_base = OTHER; note = 2'-O-methyl ribonucleotide
  modified_base 90: mod_base = OTHER; note = 2'-O-methyl ribonucleotide
  modified_base 91: mod_base = OTHER; note = 2'-O-methyl ribonucleotide
  modified_base 92: mod_base = OTHER; note = 2'-O-methyl ribonucleotide
  modified_base 93: mod_base = OTHER; note = 2'-O-methyl ribonucleotide
  modified_base 94: mod_base = OTHER; note = 2'-O-methyl ribonucleotide
  modified_base 95: mod_base = OTHER; note = 2'-O-methyl ribonucleotide
  modified_base 96: mod_base = OTHER; note = 2'-O-methyl ribonucleotide
  modified_base 97: mod_base = OTHER; note = 2'-O-methyl ribonucleotide
  modified_base 98: mod_base = OTHER; note = 2'-O-methyl ribonucleotide
  modified_base 99: mod_base = OTHER; note = 2'-O-methyl ribonucleotide
  modified_base 100: mod_base = OTHER; note = 2'-O-methyl ribonucleotide
  modified_base 9: mod_base = OTHER; note = nebularine
  modified_base 57: mod_base = OTHER; note = nebularine
  modified_base 1..3: mod_base = OTHER; note = phosphorothioate linkage
  modified_base 98..100: mod_base = OTHER; note = phosphorothioate linkage

SEQ ID NO: 3190 - RNA, 100 nt, synthetic construct; identical to SEQ ID NO: 2109
  source 1..100: mol_type = other RNA
  modified_base 1: mod_base = OTHER; note = 2'-O-methyl ribonucleotide
  modified_base 2: mod_base = OTHER; note = 2'-O-methyl ribonucleotide
  modified_base 3: mod_base = OTHER; note = 2'-O-methyl ribonucleotide
  modified_base 29: mod_base = OTHER; note = 2'-O-methyl ribonucleotide
  modified_base 30: mod_base = OTHER; note = 2'-O-methyl ribonucleotide
  modified_base 31: mod_base = OTHER; note = 2'-O-methyl ribonucleotide
  modified_base 32: mod_base = OTHER; note = 2'-O-methyl ribonucleotide
  modified_base 33: mod_base = OTHER; note = 2'-O-methyl ribonucleotide
  modified_base 34: mod_base = OTHER; note = 2'-O-methyl ribonucleotide
  modified_base 35: mod_base = OTHER; note = 2'-O-methyl ribonucleotide
  modified_base 36: mod_base = OTHER; note = 2'-O-methyl ribonucleotide
  modified_base 37: mod_base = OTHER; note = 2'-O-methyl ribonucleotide
  modified_base 38: mod_base = OTHER; note = 2'-O-methyl ribonucleotide
  modified_base 39: mod_base = OTHER; note = 2'-O-methyl ribonucleotide
  modified_base 40: mod_base = OTHER; note = 2'-O-methyl ribonucleotide
  modified_base 69: mod_base = OTHER; note = 2'-O-methyl ribonucleotide
  modified_base 70: mod_base = OTHER; note = 2'-O-methyl ribonucleotide
  modified_base 71: mod_base = OTHER; note = 2'-O-methyl ribonucleotide
  modified_base 72: mod_base = OTHER; note = 2'-O-methyl ribonucleotide
  modified_base 73: mod_base = OTHER; note = 2'-O-methyl ribonucleotide
  modified_base 74: mod_base = OTHER; note = 2'-O-methyl ribonucleotide
  modified_base 75: mod_base = OTHER; note = 2'-O-methyl ribonucleotide
  modified_base 76: mod_base = OTHER; note = 2'-O-methyl ribonucleotide
  modified_base 77: mod_base = OTHER; note = 2'-O-methyl ribonucleotide
  modified_base 78: mod_base = OTHER; note = 2'-O-methyl ribonucleotide
  modified_base 79: mod_base = OTHER; note = 2'-O-methyl ribonucleotide
  modified_base 80: mod_base = OTHER; note = 2'-O-methyl ribonucleotide
  modified_base 81: mod_base = OTHER; note = 2'-O-methyl ribonucleotide
  modified_base 82: mod_base = OTHER; note = 2'-O-methyl ribonucleotide
  modified_base 83: mod_base = OTHER; note = 2'-O-methyl ribonucleotide
  modified_base 84: mod_base = OTHER; note = 2'-O-methyl ribonucleotide
  modified_base 85: mod_base = OTHER; note = 2'-O-methyl ribonucleotide
  modified_base 86: mod_base = OTHER; note = 2'-O-methyl ribonucleotide
  modified_base 87: mod_base = OTHER; note = 2'-O-methyl ribonucleotide
  modified_base 88: mod_base = OTHER; note = 2'-O-methyl ribonucleotide
  modified_base 89: mod_base = OTHER; note = 2'-O-methyl ribonucleotide
  modified_base 90: mod_base = OTHER; note = 2'-O-methyl ribonucleotide
  modified_base 91: mod_base = OTHER; note = 2'-O-methyl ribonucleotide
  modified_base 92: mod_base = OTHER; note = 2'-O-methyl ribonucleotide
  modified_base 93: mod_base = OTHER; note = 2'-O-methyl ribonucleotide
  modified_base 94: mod_base = OTHER; note = 2'-O-methyl ribonucleotide
  modified_base 95: mod_base = OTHER; note = 2'-O-methyl ribonucleotide
  modified_base 96: mod_base = OTHER; note = 2'-O-methyl ribonucleotide
  modified_base 97: mod_base = OTHER; note = 2'-O-methyl ribonucleotide
  modified_base 98: mod_base = OTHER; note = nebularine
  modified_base 99: mod_base = OTHER; note = nebularine
  modified_base 100: mod_base = OTHER; note = nebularine
  modified_base 1..4: mod_base = OTHER; note = phosphorothioate linkage
  modified_base 97..100: mod_base = OTHER; note = phosphorothioate linkage

SEQ ID NO: 3191 - RNA, 100 nt, synthetic construct; identical to SEQ ID NO: 2109
  source 1..100: mol_type = other RNA
  modified_base 1: mod_base = OTHER; note = 2'-O-methyl ribonucleotide
  modified_base 2: mod_base = OTHER; note = 2'-O-methyl ribonucleotide
  modified_base 3: mod_base = OTHER; note = 2'-O-methyl ribonucleotide
  modified_base 21: mod_base = OTHER; note = 2'-O-methyl ribonucleotide
  modified_base 28: mod_base = OTHER; note = 2'-O-methyl ribonucleotide
  modified_base 29: mod_base = OTHER; note = 2'-O-methyl ribonucleotide
  modified_base 30: mod_base = OTHER; note = 2'-O-methyl ribonucleotide
  modified_base 31: mod_base = OTHER; note = 2'-O-methyl ribonucleotide
  modified_base 32: mod_base = OTHER; note = 2'-O-methyl ribonucleotide
  modified_base 34: mod_base = OTHER; note = 2'-O-methyl ribonucleotide
  modified_base 35: mod_base = OTHER; note = 2'-O-methyl ribonucleotide
  modified_base 36: mod_base = OTHER; note = 2'-O-methyl ribonucleotide
  modified_base 37: mod_base = OTHER; note = 2'-O-methyl ribonucleotide
  modified_base 38: mod_base = OTHER; note = 2'-O-methyl ribonucleotide
  modified_base 39: mod_base = OTHER; note = 2'-O-methyl ribonucleotide
  modified_base 40: mod_base = OTHER; note = 2'-O-methyl ribonucleotide
  modified_base 41: mod_base = OTHER; note = 2'-O-methyl ribonucleotide
  modified_base 42: mod_base = OTHER; note = 2'-O-methyl ribonucleotide
  modified_base 46: mod_base = OTHER; note = 2'-O-methyl ribonucleotide
  modified_base 48: mod_base = OTHER; note = 2'-O-methyl ribonucleotide
  modified_base 50: mod_base = OTHER; note = 2'-O-methyl ribonucleotide
  modified_base 52: mod_base = OTHER; note = 2'-O-methyl ribonucleotide
  modified_base 53: mod_base = OTHER; note = 2'-O-methyl ribonucleotide
  modified_base 54: mod_base = OTHER; note = 2'-O-methyl ribonucleotide
  modified_base 57: mod_base = OTHER; note = 2'-O-methyl ribonucleotide
  modified_base 61: mod_base = OTHER; note = 2'-O-methyl ribonucleotide
  modified_base 66: mod_base = OTHER; note = 2'-O-methyl ribonucleotide
  modified_base 67: mod_base = OTHER; note = 2'-O-methyl ribonucleotide
  modified_base 70: mod_base = OTHER; note = 2'-O-methyl ribonucleotide
  modified_base 71: mod_base = OTHER; note = 2'-O-methyl ribonucleotide
  modified_base 72: mod_base = OTHER; note = 2'-O-methyl ribonucleotide
  modified_base 74: mod_base = OTHER; note = 2'-O-methyl ribonucleotide
  modified_base 75: mod_base = OTHER; note = 2'-O-methyl ribonucleotide
  modified_base 76: mod_base = OTHER; note = 2'-O-methyl ribonucleotide
  modified_base 77: mod_base = OTHER; note = 2'-O-methyl ribonucleotide
  modified_base 78: mod_base = OTHER; note = 2'-O-methyl ribonucleotide
  modified_base 79: mod_base = OTHER; note = 2'-O-methyl ribonucleotide
  modified_base 80: mod_base = OTHER; note = 2'-O-methyl ribonucleotide
  modified_base 82: mod_base = OTHER; note = 2'-O-methyl ribonucleotide
  modified_base 83: mod_base = OTHER; note = 2'-O-methyl ribonucleotide
  modified_base 84: mod_base = OTHER; note = 2'-O-methyl ribonucleotide
  modified_base 85: mod_base = OTHER; note = 2'-O-methyl ribonucleotide
  modified_base 86: mod_base = OTHER; note = 2'-O-methyl ribonucleotide
  modified_base 87: mod_base = OTHER; note = 2'-O-methyl ribonucleotide
  modified_base 89: mod_base = OTHER; note = 2'-O-methyl ribonucleotide
  modified_base 92: mod_base = OTHER; note = 2'-O-methyl ribonucleotide
  modified_base 93: mod_base = OTHER; note = 2'-O-methyl ribonucleotide
  modified_base 94: mod_base = OTHER; note = 2'-O-methyl ribonucleotide
  modified_base 95: mod_base = OTHER; note = 2'-O-methyl ribonucleotide
  modified_base 96: mod_base = OTHER; note = 2'-O-methyl ribonucleotide
  modified_base 97: mod_base = OTHER; note = 2'-O-methyl ribonucleotide
  modified_base 98: mod_base = OTHER; note = nebularine
  modified_base 99: mod_base = OTHER; note = nebularine
  modified_base 100: mod_base = OTHER; note = nebularine
  modified_base 1..4: mod_base = OTHER; note = phosphorothioate linkage
  modified_base 97..100: mod_base = OTHER; note = phosphorothioate linkage

SEQ ID NO: 3192 - RNA, 100 nt, synthetic construct; identical to SEQ ID NO: 2109
  source 1..100: mol_type = other RNA
  modified_base 1: mod_base = OTHER; note = 2'-O-methyl ribonucleotide
  modified_base 2: mod_base = OTHER; note = 2'-O-methyl ribonucleotide
  modified_base 3: mod_base = OTHER; note = 2'-O-methyl ribonucleotide
  modified_base 21: mod_base = OTHER; note = 2'-O-methyl ribonucleotide
  modified_base 28: mod_base = OTHER; note = 2'-O-methyl ribonucleotide
  modified_base 29: mod_base = OTHER; note = 2'-O-methyl ribonucleotide
  modified_base 30: mod_base = OTHER; note = 2'-O-methyl ribonucleotide
  modified_base 31: mod_base = OTHER; note = 2'-O-methyl ribonucleotide
  modified_base 32: mod_base = OTHER; note = 2'-O-methyl ribonucleotide
  modified_base 33: mod_base = OTHER; note = 2'-O-methyl ribonucleotide
  modified_base 34: mod_base = OTHER; note = 2'-O-methyl ribonucleotide
  modified_base 35: mod_base = OTHER; note = 2'-O-methyl ribonucleotide
  modified_base 36: mod_base = OTHER; note = 2'-O-methyl ribonucleotide
  modified_base 37: mod_base = OTHER; note = 2'-O-methyl ribonucleotide
  modified_base 38: mod_base = OTHER; note = 2'-O-methyl ribonucleotide
  modified_base 39: mod_base = OTHER; note = 2'-O-methyl ribonucleotide
  modified_base 40: mod_base = OTHER; note = 2'-O-methyl ribonucleotide
  modified_base 41: mod_base = OTHER; note = 2'-O-methyl ribonucleotide
  modified_base 42: mod_base = OTHER; note = 2'-O-methyl ribonucleotide
  modified_base 46: mod_base = OTHER; note = 2'-O-methyl ribonucleotide
  modified_base 48: mod_base = OTHER; note = 2'-O-methyl ribonucleotide
  modified_base 50: mod_base = OTHER; note = 2'-O-methyl ribonucleotide
  modified_base 52: mod_base = OTHER; note = 2'-O-methyl ribonucleotide
  modified_base 53: mod_base = OTHER; note = 2'-O-methyl ribonucleotide
  modified_base 54: mod_base = OTHER; note = 2'-O-methyl ribonucleotide
  modified_base 55: mod_base = OTHER; note = 2'-O-methyl ribonucleotide
  modified_base 56: mod_base = OTHER; note = 2'-O-methyl ribonucleotide
  modified_base 57: mod_base = OTHER; note = 2'-O-methyl ribonucleotide
  modified_base 60: mod_base = OTHER; note = 2'-O-methyl ribonucleotide
  modified_base 61: mod_base = OTHER; note = 2'-O-methyl ribonucleotide
  modified_base 66: mod_base = OTHER; note = 2'-O-methyl ribonucleotide
  modified_base 67: mod_base = OTHER; note = 2'-O-methyl ribonucleotide
  modified_base 70: mod_base = OTHER; note = 2'-O-methyl ribonucleotide
  modified_base 71: mod_base = OTHER; note = 2'-O-methyl ribonucleotide
  modified_base 72: mod_base = OTHER; note = 2'-O-methyl ribonucleotide
  modified_base 73: mod_base = OTHER; note = 2'-O-methyl ribonucleotide
  modified_base 74: mod_base = OTHER; note = 2'-O-methyl ribonucleotide
  modified_base 75: mod_base = OTHER; note = 2'-O-methyl ribonucleotide
  modified_base 76: mod_base = OTHER; note = 2'-O-methyl ribonucleotide
  modified_base 77: mod_base = OTHER; note = 2'-O-methyl ribonucleotide
  modified_base 78: mod_base = OTHER; note = 2'-O-methyl ribonucleotide
  modified_base 79: mod_base = OTHER; note = 2'-O-methyl ribonucleotide
  modified_base 80: mod_base = OTHER; note = 2'-O-methyl ribonucleotide
  modified_base 81: mod_base = OTHER; note = 2'-O-methyl ribonucleotide
  modified_base 83: mod_base = OTHER; note = 2'-O-methyl ribonucleotide
  modified_base 84: mod_base = OTHER; note = 2'-O-methyl ribonucleotide
  modified_base 85: mod_base = OTHER; note = 2'-O-methyl ribonucleotide
  modified_base 86: mod_base = OTHER; note = 2'-O-methyl ribonucleotide
  modified_base 87: mod_base = OTHER; note = 2'-O-methyl ribonucleotide
  modified_base 88: mod_base = OTHER; note = 2'-O-methyl ribonucleotide
  modified_base 89: mod_base = OTHER; note = 2'-O-methyl ribonucleotide
  modified_base 90: mod_base = OTHER; note = 2'-O-methyl ribonucleotide
  modified_base 91: mod_base = OTHER; note = 2'-O-methyl ribonucleotide
  modified_base 92: mod_base = OTHER; note = 2'-O-methyl ribonucleotide
  modified_base 93: mod_base = OTHER; note = 2'-O-methyl ribonucleotide
  modified_base 94: mod_base = OTHER; note = 2'-O-methyl ribonucleotide
  modified_base 95: mod_base = OTHER; note = 2'-O-methyl ribonucleotide
  modified_base 96: mod_base = OTHER; note = 2'-O-methyl ribonucleotide
  modified_base 97: mod_base = OTHER; note = 2'-O-methyl ribonucleotide
  modified_base 98: mod_base = OTHER; note = nebularine
  modified_base 99: mod_base = OTHER; note = nebularine
  modified_base 100: mod_base = OTHER; note = nebularine
  modified_base 1..4: mod_base = OTHER; note = phosphorothioate linkage
  modified_base 97..100: mod_base = OTHER; note = phosphorothioate linkage

SEQ ID NO: 3193 - RNA, 100 nt, synthetic construct; identical to SEQ ID NO: 2111
  source 1..100: mol_type = other RNA
  modified_base 1: mod_base = OTHER; note = 2'-O-methyl ribonucleotide
  modified_base 2: mod_base = OTHER; note = 2'-O-methyl ribonucleotide
  modified_base 3: mod_base = OTHER; note = 2'-O-methyl ribonucleotide
  modified_base 29: mod_base = OTHER; note = 2'-O-methyl ribonucleotide
  modified_base 30: mod_base = OTHER; note = 2'-O-methyl ribonucleotide
  modified_base 31: mod_base = OTHER; note = 2'-O-methyl ribonucleotide
  modified_base 32: mod_base = OTHER; note = 2'-O-methyl ribonucleotide
  modified_base 33: mod_base = OTHER; note = 2'-O-methyl ribonucleotide
  modified_base 34: mod_base = OTHER; note = 2'-O-methyl ribonucleotide
  modified_base 35: mod_base = OTHER; note = 2'-O-methyl ribonucleotide
  modified_base 36: mod_base = OTHER; note = 2'-O-methyl ribonucleotide
  modified_base 37: mod_base = OTHER; note = 2'-O-methyl ribonucleotide
  modified_base 38: mod_base = OTHER; note = 2'-O-methyl ribonucleotide
  modified_base 39: mod_base = OTHER; note = 2'-O-methyl ribonucleotide
  modified_base 40: mod_base = OTHER; note = 2'-O-methyl ribonucleotide
  modified_base 69: mod_base = OTHER; note = 2'-O-methyl ribonucleotide
  modified_base 70: mod_base = OTHER; note = 2'-O-methyl ribonucleotide
  modified_base 71: mod_base = OTHER; note = 2'-O-methyl ribonucleotide
  modified_base 72: mod_base = OTHER; note = 2'-O-methyl ribonucleotide
  modified_base 73: mod_base = OTHER; note = 2'-O-methyl ribonucleotide
  modified_base 74: mod_base = OTHER; note = 2'-O-methyl ribonucleotide
  modified_base 75: mod_base = OTHER; note = 2'-O-methyl ribonucleotide
  modified_base 76: mod_base = OTHER; note = 2'-O-methyl ribonucleotide
  modified_base 77: mod_base = OTHER; note = 2'-O-methyl ribonucleotide
  modified_base 78: mod_base = OTHER; note = 2'-O-methyl ribonucleotide
  modified_base 79: mod_base = OTHER; note = 2'-O-methyl ribonucleotide
  modified_base 80: mod_base = OTHER; note = 2'-O-methyl ribonucleotide
  modified_base 81: mod_base = OTHER; note = 2'-O-methyl ribonucleotide
  modified_base 82: mod_base = OTHER; note = 2'-O-methyl ribonucleotide
  modified_base 83: mod_base = OTHER; note = 2'-O-methyl ribonucleotide
  modified_base 84: mod_base = OTHER; note = 2'-O-methyl ribonucleotide
  modified_base 85: mod_base = OTHER; note = 2'-O-methyl ribonucleotide
  modified_base 86: mod_base = OTHER; note = 2'-O-methyl ribonucleotide
  modified_base 87: mod_base = OTHER; note = 2'-O-methyl ribonucleotide
  modified_base 88: mod_base = OTHER; note = 2'-O-methyl ribonucleotide
  modified_base 89: mod_base = OTHER; note = 2'-O-methyl ribonucleotide
  modified_base 90: mod_base = OTHER; note = 2'-O-methyl ribonucleotide
  modified_base 91: mod_base = OTHER; note = 2'-O-methyl ribonucleotide
  modified_base 92: mod_base = OTHER; note = 2'-O-methyl ribonucleotide
  modified_base 93: mod_base = OTHER; note = 2'-O-methyl ribonucleotide
  modified_base 94: mod_base = OTHER; note = 2'-O-methyl ribonucleotide
  modified_base 95: mod_base = OTHER; note = 2'-O-methyl ribonucleotide
  modified_base 96: mod_base = OTHER; note = 2'-O-methyl ribonucleotide
  modified_base 97: mod_base = OTHER; note = 2'-O-methyl ribonucleotide
  modified_base 98: mod_base = OTHER; note = 2'-O-methyl ribonucleotide
  modified_base 99: mod_base = OTHER; note = nebularine
  modified_base 100: mod_base = OTHER; note = nebularine
  modified_base 1..4: mod_base = OTHER; note = phosphorothioate linkage
  modified_base 97..100: mod_base = OTHER; note = phosphorothioate linkage

SEQ ID NO: 3194 - RNA, 100 nt, synthetic construct; identical to SEQ ID NO: 2111
  source 1..100: mol_type = other RNA
  modified_base 1: mod_base = OTHER; note = 2'-O-methyl ribonucleotide
  modified_base 2: mod_base = OTHER; note = 2'-O-methyl ribonucleotide
  modified_base 3: mod_base = OTHER; note = 2'-O-methyl ribonucleotide
  modified_base 21: mod_base = OTHER; note = 2'-O-methyl ribonucleotide
  modified_base 28: mod_base = OTHER; note = 2'-O-methyl ribonucleotide
  modified_base 29: mod_base = OTHER; note = 2'-O-methyl ribonucleotide
  modified_base 30: mod_base = OTHER; note = 2'-O-methyl ribonucleotide
  modified_base 31: mod_base = OTHER; note = 2'-O-methyl ribonucleotide
  modified_base 32: mod_base = OTHER; note = 2'-O-methyl ribonucleotide
  modified_base 34: mod_base = OTHER; note = 2'-O-methyl ribonucleotide
  modified_base 35: mod_base = OTHER; note = 2'-O-methyl ribonucleotide
  modified_base 36: mod_base = OTHER; note = 2'-O-methyl ribonucleotide
  modified_base 37: mod_base = OTHER; note = 2'-O-methyl ribonucleotide
  modified_base 38: mod_base = OTHER; note = 2'-O-methyl ribonucleotide
  modified_base 39: mod_base = OTHER; note = 2'-O-methyl ribonucleotide
  modified_base 40: mod_base = OTHER; note = 2'-O-methyl ribonucleotide
  modified_base 41: mod_base = OTHER; note = 2'-O-methyl ribonucleotide
  modified_base 42: mod_base = OTHER; note = 2'-O-methyl ribonucleotide
  modified_base 46: mod_base = OTHER; note = 2'-O-methyl ribonucleotide
  modified_base 48: mod_base = OTHER; note = 2'-O-methyl ribonucleotide
  modified_base 50: mod_base = OTHER; note = 2'-O-methyl ribonucleotide
  modified_base 52: mod_base = OTHER; note = 2'-O-methyl ribonucleotide
  modified_base 53: mod_base = OTHER; note = 2'-O-methyl ribonucleotide
  modified_base 54: mod_base = OTHER; note = 2'-O-methyl ribonucleotide
  modified_base 57: mod_base = OTHER; note = 2'-O-methyl ribonucleotide
  modified_base 61: mod_base = OTHER; note = 2'-O-methyl ribonucleotide
  modified_base 66: mod_base = OTHER; note = 2'-O-methyl ribonucleotide
  modified_base 67: mod_base = OTHER; note = 2'-O-methyl ribonucleotide
  modified_base 70: mod_base = OTHER; note = 2'-O-methyl ribonucleotide
  modified_base 71: mod_base = OTHER; note = 2'-O-methyl ribonucleotide
  modified_base 72: mod_base = OTHER; note = 2'-O-methyl ribonucleotide
  modified_base 74: mod_base = OTHER; note = 2'-O-methyl ribonucleotide
  modified_base 75: mod_base = OTHER; note = 2'-O-methyl ribonucleotide
  modified_base 76: mod_base = OTHER; note = 2'-O-methyl ribonucleotide
  modified_base 77: mod_base = OTHER; note = 2'-O-methyl ribonucleotide
  modified_base 78: mod_base = OTHER; note = 2'-O-methyl ribonucleotide
  modified_base 79: mod_base = OTHER; note = 2'-O-methyl ribonucleotide
  modified_base 80: mod_base = OTHER; note = 2'-O-methyl ribonucleotide
  modified_base 82: mod_base = OTHER; note = 2'-O-methyl ribonucleotide
  modified_base 83: mod_base = OTHER; note = 2'-O-methyl ribonucleotide
  modified_base 84: mod_base = OTHER; note = 2'-O-methyl ribonucleotide
  modified_base 85: mod_base = OTHER; note = 2'-O-methyl ribonucleotide
  modified_base 86: mod_base = OTHER; note = 2'-O-methyl ribonucleotide
  modified_base 87: mod_base = OTHER; note = 2'-O-methyl ribonucleotide
  modified_base 89: mod_base = OTHER; note = 2'-O-methyl ribonucleotide
  modified_base 92: mod_base = OTHER; note = 2'-O-methyl ribonucleotide
  modified_base 93: mod_base = OTHER; note = 2'-O-methyl ribonucleotide
  modified_base 94: mod_base = OTHER; note = 2'-O-methyl ribonucleotide
  modified_base 95: mod_base = OTHER; note = 2'-O-methyl ribonucleotide
  modified_base 96: mod_base = OTHER; note = 2'-O-methyl ribonucleotide
  modified_base 97: mod_base = OTHER; note = 2'-O-methyl ribonucleotide
  modified_base 98: mod_base = OTHER; note = 2'-O-methyl ribonucleotide
  modified_base 99: mod_base = OTHER; note = nebularine
  modified_base 100: mod_base = OTHER; note = nebularine
  modified_base 1..4: mod_base = OTHER; note = phosphorothioate linkage
  modified_base 97..100: mod_base = OTHER; note = phosphorothioate linkage

SEQ ID NO: 3195 - RNA, 100 nt, synthetic construct; identical to SEQ ID NO: 2111
  source 1..100: mol_type = other RNA
  modified_base 1: mod_base = OTHER; note = 2'-O-methyl ribonucleotide
  modified_base 2: mod_base = OTHER; note = 2'-O-methyl ribonucleotide
  modified_base 3: mod_base = OTHER; note = 2'-O-methyl ribonucleotide
  modified_base 21: mod_base = OTHER; note = 2'-O-methyl ribonucleotide
  modified_base 28: mod_base = OTHER; note = 2'-O-methyl ribonucleotide
  modified_base 29: mod_base = OTHER; note = 2'-O-methyl ribonucleotide
  modified_base 30: mod_base = OTHER; note = 2'-O-methyl ribonucleotide
  modified_base 31: mod_base = OTHER; note = 2'-O-methyl ribonucleotide
  modified_base 32: mod_base = OTHER; note = 2'-O-methyl ribonucleotide
  modified_base 33: mod_base = OTHER; note = 2'-O-methyl ribonucleotide
  modified_base 34: mod_base = OTHER; note = 2'-O-methyl ribonucleotide
  modified_base 35: mod_base = OTHER; note = 2'-O-methyl ribonucleotide
  modified_base 36: mod_base = OTHER; note = 2'-O-methyl ribonucleotide
  modified_base 37: mod_base = OTHER; note = 2'-O-methyl ribonucleotide
  modified_base 38: mod_base = OTHER; note = 2'-O-methyl ribonucleotide
  modified_base 39: mod_base = OTHER; note = 2'-O-methyl ribonucleotide
  modified_base 40: mod_base = OTHER; note = 2'-O-methyl ribonucleotide
  modified_base 41: mod_base = OTHER; note = 2'-O-methyl ribonucleotide
  modified_base 42: mod_base = OTHER; note = 2'-O-methyl ribonucleotide
  modified_base 46: mod_base = OTHER; note = 2'-O-methyl ribonucleotide
  modified_base 48: mod_base = OTHER; note = 2'-O-methyl ribonucleotide
  modified_base 50: mod_base = OTHER; note = 2'-O-methyl ribonucleotide
  modified_base 52: mod_base = OTHER; note = 2'-O-methyl ribonucleotide
  modified_base 53: mod_base = OTHER; note = 2'-O-methyl ribonucleotide
  modified_base 54: mod_base = OTHER; note = 2'-O-methyl ribonucleotide
  modified_base 55: mod_base = OTHER; note = 2'-O-methyl ribonucleotide
  modified_base 56: mod_base = OTHER; note = 2'-O-methyl ribonucleotide
  modified_base 57: mod_base = OTHER; note = 2'-O-methyl ribonucleotide
  modified_base 60: mod_base = OTHER; note = 2'-O-methyl ribonucleotide
  modified_base 61: mod_base = OTHER; note = 2'-O-methyl ribonucleotide
  modified_base 66: mod_base = OTHER; note = 2'-O-methyl ribonucleotide
  modified_base 67: mod_base = OTHER; note = 2'-O-methyl ribonucleotide
  modified_base 70: mod_base = OTHER; note = 2'-O-methyl ribonucleotide
  modified_base 71: mod_base = OTHER; note = 2'-O-methyl ribonucleotide
  modified_base 72: mod_base = OTHER; note = 2'-O-methyl ribonucleotide
  modified_base 73: mod_base = OTHER; note = 2'-O-methyl ribonucleotide
  modified_base 74: mod_base = OTHER; note = 2'-O-methyl ribonucleotide
  modified_base 75: mod_base = OTHER; note = 2'-O-methyl ribonucleotide
  modified_base 76: mod_base = OTHER; note = 2'-O-methyl ribonucleotide
  modified_base 77: mod_base = OTHER; note = 2'-O-methyl ribonucleotide
  modified_base 78: mod_base = OTHER; note = 2'-O-methyl ribonucleotide
  modified_base 79: mod_base = OTHER; note = 2'-O-methyl ribonucleotide
  modified_base 80: mod_base = OTHER; note = 2'-O-methyl ribonucleotide
  modified_base 81: mod_base = OTHER; note = 2'-O-methyl ribonucleotide
  modified_base 83: mod_base = OTHER; note = 2'-O-methyl ribonucleotide
  modified_base 84: mod_base = OTHER; note = 2'-O-methyl ribonucleotide
  modified_base 85: mod_base = OTHER; note = 2'-O-methyl ribonucleotide
  modified_base 86: mod_base = OTHER; note = 2'-O-methyl ribonucleotide
  modified_base 87: mod_base = OTHER; note = 2'-O-methyl ribonucleotide
  modified_base 88: mod_base = OTHER; note = 2'-O-methyl ribonucleotide
  modified_base 89: mod_base = OTHER; note = 2'-O-methyl ribonucleotide
  modified_base 90: mod_base = OTHER; note = 2'-O-methyl ribonucleotide
  modified_base 91: mod_base = OTHER; note = 2'-O-methyl ribonucleotide
  modified_base 92: mod_base = OTHER; note = 2'-O-methyl ribonucleotide
  modified_base 93: mod_base = OTHER; note = 2'-O-methyl ribonucleotide
  modified_base 94: mod_base = OTHER; note = 2'-O-methyl ribonucleotide
  modified_base 95: mod_base = OTHER; note = 2'-O-methyl ribonucleotide
  modified_base 96: mod_base = OTHER; note = 2'-O-methyl ribonucleotide
  modified_base 97: mod_base = OTHER; note = 2'-O-methyl ribonucleotide
  modified_base 98: mod_base = OTHER; note = 2'-O-methyl ribonucleotide
  modified_base 99: mod_base = OTHER; note = nebularine
  modified_base 100: mod_base = OTHER; note = nebularine
  modified_base 1..4: mod_base = OTHER; note = phosphorothioate linkage
  modified_base 97..100: mod_base = OTHER; note = phosphorothioate linkage

SEQ ID NO: 3196 - RNA, 100 nt, synthetic construct; identical to SEQ ID NO: 2113
  source 1..100: mol_type = other RNA
  modified_base 1: mod_base = OTHER; note = 2'-O-methyl ribonucleotide
  modified_base 2: mod_base = OTHER; note = 2'-O-methyl ribonucleotide
  modified_base 3: mod_base = OTHER; note = 2'-O-methyl ribonucleotide
  modified_base 29: mod_base = OTHER; note = 2'-O-methyl ribonucleotide
  modified_base 30: mod_base = OTHER; note = 2'-O-methyl ribonucleotide
  modified_base 31: mod_base = OTHER; note = 2'-O-methyl ribonucleotide
  modified_base 32: mod_base = OTHER; note = 2'-O-methyl ribonucleotide
  modified_base 33: mod_base = OTHER; note = 2'-O-methyl ribonucleotide
  modified_base 34: mod_base = OTHER; note = 2'-O-methyl ribonucleotide
  modified_base 35: mod_base = OTHER; note = 2'-O-methyl ribonucleotide
  modified_base 36: mod_base = OTHER; note = 2'-O-methyl ribonucleotide
  modified_base 37: mod_base = OTHER; note = 2'-O-methyl ribonucleotide
  modified_base 38: mod_base = OTHER; note = 2'-O-methyl ribonucleotide
  modified_base 39: mod_base = OTHER; note = 2'-O-methyl ribonucleotide
  modified_base 40: mod_base = OTHER; note = 2'-O-methyl ribonucleotide
  modified_base 69: mod_base = OTHER; note = 2'-O-methyl ribonucleotide
  modified_base 70: mod_base = OTHER; note = 2'-O-methyl ribonucleotide
  modified_base 71: mod_base = OTHER; note = 2'-O-methyl ribonucleotide
  modified_base 72: mod_base = OTHER; note = 2'-O-methyl ribonucleotide
  modified_base 73: mod_base = OTHER; note = 2'-O-methyl ribonucleotide
  modified_base 74: mod_base = OTHER; note = 2'-O-methyl ribonucleotide
  modified_base 75: mod_base = OTHER; note = 2'-O-methyl ribonucleotide
  modified_base 76: mod_base = OTHER; note = 2'-O-methyl ribonucleotide
  modified_base 77: mod_base = OTHER; note = 2'-O-methyl ribonucleotide
  modified_base 78: mod_base = OTHER; note = 2'-O-methyl ribonucleotide
  modified_base 79: mod_base = OTHER; note = 2'-O-methyl ribonucleotide
  modified_base 80: mod_base = OTHER; note = 2'-O-methyl ribonucleotide
  modified_base 81: mod_base = OTHER; note = 2'-O-methyl ribonucleotide
  modified_base 82: mod_base = OTHER; note = 2'-O-methyl ribonucleotide
  modified_base 83: mod_base = OTHER; note = 2'-O-methyl ribonucleotide
  modified_base 84: mod_base = OTHER; note = 2'-O-methyl ribonucleotide
  modified_base 85: mod_base = OTHER; note = 2'-O-methyl ribonucleotide
  modified_base 86: mod_base = OTHER; note = 2'-O-methyl ribonucleotide
  modified_base 87: mod_base = OTHER; note = 2'-O-methyl ribonucleotide
  modified_base 88: mod_base = OTHER; note = 2'-O-methyl ribonucleotide
  modified_base 89: mod_base = OTHER; note = 2'-O-methyl ribonucleotide
  modified_base 90: mod_base = OTHER; note = 2'-O-methyl ribonucleotide
  modified_base 91: mod_base = OTHER; note = 2'-O-methyl ribonucleotide
  modified_base 92: mod_base = OTHER; note = 2'-O-methyl ribonucleotide
  modified_base 93: mod_base = OTHER; note = 2'-O-methyl ribonucleotide
  modified_base 94: mod_base = OTHER; note = 2'-O-methyl ribonucleotide
  modified_base 95: mod_base = OTHER; note = 2'-O-methyl ribonucleotide
  modified_base 96: mod_base = OTHER; note = 2'-O-methyl ribonucleotide
  modified_base 97: mod_base = OTHER; note = 2'-O-methyl ribonucleotide
  modified_base 98: mod_base = OTHER; note = 2'-O-methyl ribonucleotide
  modified_base 99: mod_base = OTHER; note = 2'-O-methyl ribonucleotide
  modified_base 100: mod_base = OTHER; note = nebularine
  modified_base 1..4: mod_base = OTHER; note = phosphorothioate linkage
  modified_base 97..100: mod_base = OTHER; note = phosphorothioate linkage

SEQ ID NO: 3197 - RNA, 100 nt, synthetic construct; identical to SEQ ID NO: 2113
  source 1..100: mol_type = other RNA
  modified_base 1: mod_base = OTHER; note = 2'-O-methyl ribonucleotide
  modified_base 2: mod_base = OTHER; note = 2'-O-methyl ribonucleotide
  modified_base 3: mod_base = OTHER; note = 2'-O-methyl ribonucleotide
  modified_base 21: mod_base = OTHER; note = 2'-O-methyl ribonucleotide
  modified_base 28: mod_base = OTHER; note = 2'-O-methyl ribonucleotide
  modified_base 29: mod_base = OTHER; note = 2'-O-methyl ribonucleotide
  modified_base 30: mod_base = OTHER; note = 2'-O-methyl ribonucleotide
  modified_base 31: mod_base = OTHER; note = 2'-O-methyl ribonucleotide
  modified_base 32: mod_base = OTHER; note = 2'-O-methyl ribonucleotide
  modified_base 34: mod_base = OTHER; note = 2'-O-methyl ribonucleotide
  modified_base 35: mod_base = OTHER; note = 2'-O-methyl ribonucleotide
  modified_base 36: mod_base = OTHER; note = 2'-O-methyl ribonucleotide
  modified_base 37: mod_base = OTHER; note = 2'-O-methyl ribonucleotide
  modified_base 38: mod_base = OTHER; note = 2'-O-methyl ribonucleotide
  modified_base 39: mod_base = OTHER; note = 2'-O-methyl ribonucleotide
  modified_base 40: mod_base = OTHER; note = 2'-O-methyl ribonucleotide
  modified_base 41: mod_base = OTHER; note = 2'-O-methyl ribonucleotide
  modified_base 42: mod_base = OTHER; note = 2'-O-methyl ribonucleotide
  modified_base 46: mod_base = OTHER; note = 2'-O-methyl ribonucleotide
  modified_base 48: mod_base = OTHER; note = 2'-O-methyl ribonucleotide
  modified_base 50: mod_base = OTHER; note = 2'-O-methyl ribonucleotide
  modified_base 52: mod_base = OTHER; note = 2'-O-methyl ribonucleotide
  modified_base 53: mod_base = OTHER; note = 2'-O-methyl ribonucleotide
  modified_base 54: mod_base = OTHER; note = 2'-O-methyl ribonucleotide
  modified_base 57: mod_base = OTHER; note = 2'-O-methyl ribonucleotide
  modified_base 61: mod_base = OTHER; note = 2'-O-methyl ribonucleotide
  modified_base 66: mod_base = OTHER; note = 2'-O-methyl ribonucleotide
  modified_base 67: mod_base = OTHER; note = 2'-O-methyl ribonucleotide
  modified_base 70: mod_base = OTHER; note = 2'-O-methyl ribonucleotide
  modified_base 71: mod_base = OTHER; note = 2'-O-methyl ribonucleotide
  modified_base 72: mod_base = OTHER; note = 2'-O-methyl ribonucleotide
  modified_base 74: mod_base = OTHER; note = 2'-O-methyl ribonucleotide
  modified_base 75: mod_base = OTHER; note = 2'-O-methyl ribonucleotide
  modified_base 76: mod_base = OTHER; note = 2'-O-methyl ribonucleotide
  modified_base 77: mod_base = OTHER; note = 2'-O-methyl ribonucleotide
  modified_base 78: mod_base = OTHER; note = 2'-O-methyl ribonucleotide
  modified_base 79: mod_base = OTHER; note = 2'-O-methyl ribonucleotide
  modified_base 80: mod_base = OTHER; note = 2'-O-methyl ribonucleotide
  modified_base 82: mod_base = OTHER; note = 2'-O-methyl ribonucleotide
  modified_base 83: mod_base = OTHER; note = 2'-O-methyl ribonucleotide
  modified_base 84: mod_base = OTHER; note = 2'-O-methyl ribonucleotide
  modified_base 85: mod_base = OTHER; note = 2'-O-methyl ribonucleotide
  modified_base 86: mod_base = OTHER; note = 2'-O-methyl ribonucleotide
  modified_base 87: mod_base = OTHER; note = 2'-O-methyl ribonucleotide
  modified_base 89: mod_base = OTHER; note = 2'-O-methyl ribonucleotide
  modified_base 92: mod_base = OTHER; note = 2'-O-methyl ribonucleotide
  modified_base 93: mod_base = OTHER; note = 2'-O-methyl ribonucleotide
  modified_base 94: mod_base = OTHER; note = 2'-O-methyl ribonucleotide
  modified_base 95: mod_base = OTHER; note = 2'-O-methyl ribonucleotide
  modified_base 96: mod_base = OTHER; note = 2'-O-methyl ribonucleotide
  modified_base 97: mod_base = OTHER; note = 2'-O-methyl ribonucleotide
  modified_base 98: mod_base = OTHER; note = 2'-O-methyl ribonucleotide
  modified_base 99: mod_base = OTHER; note = 2'-O-methyl ribonucleotide
  modified_base 100: mod_base = OTHER; note = nebularine
  modified_base 1..4: mod_base = OTHER; note = phosphorothioate linkage
  modified_base 97..100: mod_base = OTHER; note = phosphorothioate linkage

SEQ ID NO: 3198 - RNA, 100 nt, synthetic construct; identical to SEQ ID NO: 2113
  source 1..100: mol_type = other RNA
  modified_base 1: mod_base = OTHER; note = 2'-O-methyl ribonucleotide
  modified_base 2: mod_base = OTHER; note = 2'-O-methyl ribonucleotide
  modified_base 3: mod_base = OTHER; note = 2'-O-methyl ribonucleotide
  modified_base 21: mod_base = OTHER; note = 2'-O-methyl ribonucleotide
  modified_base 28: mod_base = OTHER; note = 2'-O-methyl ribonucleotide
  modified_base 29: mod_base = OTHER; note = 2'-O-methyl ribonucleotide
  modified_base 30: mod_base = OTHER; note = 2'-O-methyl ribonucleotide
  modified_base 31: mod_base = OTHER; note = 2'-O-methyl ribonucleotide
  modified_base 32: mod_base = OTHER; note = 2'-O-methyl ribonucleotide
  modified_base 33: mod_base = OTHER; note = 2'-O-methyl ribonucleotide
  modified_base 34: mod_base = OTHER; note = 2'-O-methyl ribonucleotide
  modified_base 35: mod_base = OTHER; note = 2'-O-methyl ribonucleotide
  modified_base 36: mod_base = OTHER; note = 2'-O-methyl ribonucleotide
  modified_base 37: mod_base = OTHER; note = 2'-O-methyl ribonucleotide
  modified_base 38: mod_base = OTHER; note = 2'-O-methyl ribonucleotide
  modified_base 39: mod_base = OTHER; note = 2'-O-methyl ribonucleotide
  modified_base 40: mod_base = OTHER; note = 2'-O-methyl ribonucleotide
  modified_base 41: mod_base = OTHER; note = 2'-O-methyl ribonucleotide
  modified_base 42: mod_base = OTHER; note = 2'-O-methyl ribonucleotide
  modified_base 46: mod_base = OTHER; note = 2'-O-methyl ribonucleotide
  modified_base 48: mod_base = OTHER; note = 2'-O-methyl ribonucleotide
  modified_base 50: mod_base = OTHER; note = 2'-O-methyl ribonucleotide
  modified_base 52: mod_base = OTHER; note = 2'-O-methyl ribonucleotide
  modified_base 53: mod_base = OTHER; note = 2'-O-methyl ribonucleotide
  modified_base 54: mod_base = OTHER; note = 2'-O-methyl ribonucleotide
  modified_base 55: mod_base = OTHER; note = 2'-O-methyl ribonucleotide
  modified_base 56: mod_base = OTHER; note = 2'-O-methyl ribonucleotide
  modified_base 57: mod_base = OTHER; note = 2'-O-methyl ribonucleotide
  modified_base 60: mod_base = OTHER; note = 2'-O-methyl ribonucleotide
  modified_base 61: mod_base = OTHER; note = 2'-O-methyl ribonucleotide
  modified_base 66: mod_base = OTHER; note = 2'-O-methyl ribonucleotide
  modified_base 67: mod_base = OTHER; note = 2'-O-methyl ribonucleotide
  modified_base 70: mod_base = OTHER; note = 2'-O-methyl ribonucleotide
  modified_base 71: mod_base = OTHER; note = 2'-O-methyl ribonucleotide
  modified_base 72: mod_base = OTHER; note = 2'-O-methyl ribonucleotide
  modified_base 73: mod_base = OTHER; note = 2'-O-methyl ribonucleotide
  modified_base 74: mod_base = OTHER; note = 2'-O-methyl ribonucleotide
  modified_base 75: mod_base = OTHER; note = 2'-O-methyl ribonucleotide
  modified_base 76: mod_base = OTHER; note = 2'-O-methyl ribonucleotide
  modified_base 77: mod_base = OTHER; note = 2'-O-methyl ribonucleotide
  modified_base 78: mod_base = OTHER; note = 2'-O-methyl ribonucleotide
  modified_base 79: mod_base = OTHER; note = 2'-O-methyl ribonucleotide
  modified_base 80: mod_base = OTHER; note = 2'-O-methyl ribonucleotide
  modified_base 81: mod_base = OTHER; note = 2'-O-methyl ribonucleotide
  modified_base 83: mod_base = OTHER; note = 2'-O-methyl ribonucleotide
  modified_base 84: mod_base = OTHER; note = 2'-O-methyl ribonucleotide
  modified_base 85: mod_base = OTHER; note = 2'-O-methyl ribonucleotide
  modified_base 86: mod_base = OTHER; note = 2'-O-methyl ribonucleotide
  modified_base 87: mod_base = OTHER; note = 2'-O-methyl ribonucleotide
  modified_base 88: mod_base = OTHER; note = 2'-O-methyl ribonucleotide
  modified_base 89: mod_base = OTHER; note = 2'-O-methyl ribonucleotide
  modified_base 90: mod_base = OTHER; note = 2'-O-methyl ribonucleotide
  modified_base 91: mod_base = OTHER; note = 2'-O-methyl ribonucleotide
  modified_base 92: mod_base = OTHER; note = 2'-O-methyl ribonucleotide
  modified_base 93: mod_base = OTHER; note = 2'-O-methyl ribonucleotide
  modified_base 94: mod_base = OTHER; note = 2'-O-methyl ribonucleotide
  modified_base 95: mod_base = OTHER; note = 2'-O-methyl ribonucleotide
  modified_base 96: mod_base = OTHER; note = 2'-O-methyl ribonucleotide
  modified_base 97: mod_base = OTHER; note = 2'-O-methyl ribonucleotide
  modified_base 98: mod_base = OTHER; note = 2'-O-methyl ribonucleotide
  modified_base 99: mod_base = OTHER; note = 2'-O-methyl ribonucleotide
  modified_base 100: mod_base = OTHER; note = nebularine
  modified_base 1..4: mod_base = OTHER; note = phosphorothioate linkage
  modified_base 97..100: mod_base = OTHER; note = phosphorothioate linkage

SEQ ID NO: 3199 - DNA, 103 bp, synthetic construct; identical to SEQ ID NO: 1797
  source 1..103: mol_type = other DNA
  modified_base 1: mod_base = OTHER; note = 2'-O-methyl ribonucleotide
  modified_base 2: mod_base = OTHER; note = 2'-O-methyl ribonucleotide
  modified_base 3: mod_base = OTHER; note = 2'-O-methyl ribonucleotide
  modified_base 29: mod_base = OTHER; note = 2'-O-methyl ribonucleotide
  modified_base 30: mod_base = OTHER; note = 2'-O-methyl ribonucleotide
  modified_base 31: mod_base = OTHER; note = 2'-O-methyl ribonucleotide
  modified_base 32: mod_base = OTHER; note = 2'-O-methyl ribonucleotide
  modified_base 33: mod_base = OTHER; note = 2'-O-methyl ribonucleotide
  modified_base 34: mod_base = OTHER; note = 2'-O-methyl ribonucleotide
  modified_base 35: mod_base = OTHER; note = 2'-O-methyl ribonucleotide
  modified_base 36: mod_base = OTHER; note = 2'-O-methyl ribonucleotide
  modified_base 37: mod_base = OTHER; note = 2'-O-methyl ribonucleotide
  modified_base 38: mod_base = OTHER; note = 2'-O-methyl ribonucleotide
  modified_base 39: mod_base = OTHER; note = 2'-O-methyl ribonucleotide
  modified_base 40: mod_base = OTHER; note = 2'-O-methyl ribonucleotide
  modified_base 69: mod_base = OTHER; note = 2'-O-methyl ribonucleotide
  modified_base 70: mod_base = OTHER; note = 2'-O-methyl ribonucleotide
  modified_base 71: mod_base = OTHER; note = 2'-O-methyl ribonucleotide
  modified_base 72: mod_base = OTHER; note = 2'-O-methyl ribonucleotide
  modified_base 73: mod_base = OTHER; note = 2'-O-methyl ribonucleotide
  modified_base 74: mod_base = OTHER; note = 2'-O-methyl ribonucleotide
  modified_base 75: mod_base = OTHER; note = 2'-O-methyl ribonucleotide
  modified_base 76: mod_base = OTHER; note = 2'-O-methyl ribonucleotide
  modified_base 77: mod_base = OTHER; note = 2'-O-methyl ribonucleotide
  modified_base 78: mod_base = OTHER; note = 2'-O-methyl ribonucleotide
  modified_base 79: mod_base = OTHER; note = 2'-O-methyl ribonucleotide
  modified_base 80: mod_base = OTHER; note = 2'-O-methyl ribonucleotide
  modified_base 81: mod_base = OTHER; note = 2'-O-methyl ribonucleotide
  modified_base 82: mod_base = OTHER; note = 2'-O-methyl ribonucleotide
  modified_base 83: mod_base = OTHER; note = 2'-O-methyl ribonucleotide
  modified_base 84: mod_base = OTHER; note = 2'-O-methyl ribonucleotide
  modified_base 85: mod_base = OTHER; note = 2'-O-methyl ribonucleotide
  modified_base 86: mod_base = OTHER; note = 2'-O-methyl ribonucleotide
  modified_base 87: mod_base = OTHER; note = 2'-O-methyl ribonucleotide
  modified_base 88: mod_base = OTHER; note = 2'-O-methyl ribonucleotide
  modified_base 89: mod_base = OTHER; note = 2'-O-methyl ribonucleotide
  modified_base 90: mod_base = OTHER; note = 2'-O-methyl ribonucleotide
  modified_base 91: mod_base = OTHER; note = 2'-O-methyl ribonucleotide
  modified_base 92: mod_base = OTHER; note = 2'-O-methyl ribonucleotide
  modified_base 93: mod_base = OTHER; note = 2'-O-methyl ribonucleotide
  modified_base 94: mod_base = OTHER; note = 2'-O-methyl ribonucleotide
  modified_base 95: mod_base = OTHER; note = 2'-O-methyl ribonucleotide
  modified_base 96: mod_base = OTHER; note = 2'-O-methyl ribonucleotide
  modified_base 97: mod_base = OTHER; note = 2'-O-methyl ribonucleotide
  modified_base 98: mod_base = OTHER; note = 2'-O-methyl ribonucleotide
  modified_base 99: mod_base = OTHER; note = 2'-O-methyl ribonucleotide
  modified_base 100: mod_base = OTHER; note = 2'-O-methyl ribonucleotide
  modified_base 101: mod_base = OTHER; note = uniform 2'-O-methyl ribonucleotides (a, c, g, inosine or u), deoxyribonucleotides (A, G, C or T), 2'-O-methylnebularine or deoxynebularine
  modified_base 102: mod_base = OTHER; note = uniform 2'-O-methyl ribonucleotides (a, c, g, inosine or u), deoxyribonucleotides (A, G, C or T), 2'-O-methylnebularine or deoxynebularine
  modified_base 103: mod_base = OTHER; note = uniform 2'-O-methyl ribonucleotides (a, c, g, inosine or u), deoxyribonucleotides (A, G, C or T), 2'-O-methylnebularine or deoxynebularine
  modified_base 1..4: mod_base = OTHER; note = phosphorothioate linkage
  modified_base 97..100: mod_base = OTHER; note = phosphorothioate linkage
  misc_feature 1..100: note = RNA
  misc_feature 101..103: note = Optionally DNA or RNA

SEQ ID NO: 3200 - DNA, 103 bp, synthetic construct; identical to SEQ ID NO: 1797
  source 1..103: mol_type = other DNA
  modified_base 1: mod_base = OTHER; note = 2'-O-methyl ribonucleotide
  modified_base 2: mod_base = OTHER; note = 2'-O-methyl ribonucleotide
  modified_base 3: mod_base = OTHER; note = 2'-O-methyl ribonucleotide
  modified_base 21: mod_base = OTHER; note = 2'-O-methyl ribonucleotide
  modified_base 28: mod_base = OTHER; note = 2'-O-methyl ribonucleotide
  modified_base 29: mod_base = OTHER; note = 2'-O-methyl ribonucleotide
  modified_base 30: mod_base = OTHER; note = 2'-O-methyl ribonucleotide
  modified_base 31: mod_base = OTHER; note = 2'-O-methyl ribonucleotide
  modified_base 32: mod_base = OTHER; note = 2'-O-methyl ribonucleotide
  modified_base 34: mod_base = OTHER; note = 2'-O-methyl ribonucleotide
  modified_base 35: mod_base = OTHER; note = 2'-O-methyl ribonucleotide
  modified_base 36: mod_base = OTHER; note = 2'-O-methyl ribonucleotide
  modified_base 37: mod_base = OTHER; note = 2'-O-methyl ribonucleotide
  modified_base 38: mod_base = OTHER; note = 2'-O-methyl ribonucleotide
  modified_base 39: mod_base = OTHER; note = 2'-O-methyl ribonucleotide
  modified_base 40: mod_base = OTHER; note = 2'-O-methyl ribonucleotide
  modified_base 41: mod_base = OTHER; note = 2'-O-methyl ribonucleotide
  modified_base 42: mod_base = OTHER; note = 2'-O-methyl ribonucleotide
  modified_base 46: mod_base = OTHER; note = 2'-O-methyl ribonucleotide
  modified_base 48: mod_base = OTHER; note = 2'-O-methyl ribonucleotide
  modified_base 50: mod_base = OTHER; note = 2'-O-methyl ribonucleotide
  modified_base 52: mod_base = OTHER; note = 2'-O-methyl ribonucleotide
  modified_base 53: mod_base = OTHER; note = 2'-O-methyl ribonucleotide
  modified_base 54: mod_base = OTHER; note = 2'-O-methyl ribonucleotide
  modified_base 57: mod_base = OTHER; note = 2'-O-methyl ribonucleotide
  modified_base 61: mod_base = OTHER; note = 2'-O-methyl ribonucleotide
  modified_base 66: mod_base = OTHER; note = 2'-O-methyl ribonucleotide
  modified_base 67: mod_base = OTHER; note = 2'-O-methyl ribonucleotide
  modified_base 70: mod_base = OTHER; note = 2'-O-methyl ribonucleotide
  modified_base 71: mod_base = OTHER; note = 2'-O-methyl ribonucleotide
  modified_base 72: mod_base = OTHER; note = 2'-O-methyl ribonucleotide
  modified_base 74: mod_base = OTHER; note = 2'-O-methyl ribonucleotide
  modified_base 75: mod_base = OTHER; note = 2'-O-methyl ribonucleotide
  modified_base 76: mod_base = OTHER; note = 2'-O-methyl ribonucleotide
  modified_base 77: mod_base = OTHER; note = 2'-O-methyl ribonucleotide
  modified_base 78: mod_base = OTHER; note = 2'-O-methyl ribonucleotide
  modified_base 79: mod_base = OTHER; note = 2'-O-methyl ribonucleotide
  modified_base 80: mod_base = OTHER; note = 2'-O-methyl ribonucleotide
  modified_base 82: mod_base = OTHER; note = 2'-O-methyl ribonucleotide
  modified_base 83: mod_base = OTHER; note = 2'-O-methyl ribonucleotide
  modified_base 84: mod_base = OTHER; note = 2'-O-methyl ribonucleotide
  modified_base 85: mod_base = OTHER; note = 2'-O-methyl ribonucleotide
  modified_base 86: mod_base = OTHER; note = 2'-O-methyl ribonucleotide
  modified_base 87: mod_base = OTHER; note = 2'-O-methyl ribonucleotide
  modified_base 89: mod_base = OTHER; note = 2'-O-methyl ribonucleotide
  modified_base 92: mod_base = OTHER; note = 2'-O-methyl ribonucleotide
  modified_base 93: mod_base = OTHER; note = 2'-O-methyl ribonucleotide
  modified_base 94: mod_base = OTHER; note = 2'-O-methyl ribonucleotide
  modified_base 95: mod_base = OTHER; note = 2'-O-methyl ribonucleotide
  modified_base 96: mod_base = OTHER; note = 2'-O-methyl ribonucleotide
  modified_base 97: mod_base = OTHER; note = 2'-O-methyl ribonucleotide
  modified_base 98: mod_base = OTHER; note = 2'-O-methyl ribonucleotide
  modified_base 99: mod_base = OTHER; note = 2'-O-methyl ribonucleotide
  modified_base 100: mod_base = OTHER; note = 2'-O-methyl ribonucleotide
  modified_base 101: mod_base = OTHER; note = uniform 2'-O-methyl ribonucleotides (a, c, g, inosine or u), deoxyribonucleotides (A, G, C or T), 2'-O-methylnebularine or deoxynebularine
  modified_base 102: mod_base = OTHER; note = uniform 2'-O-methyl ribonucleotides (a, c, g, inosine or u), deoxyribonucleotides (A, G, C or T), 2'-O-methylnebularine or deoxynebularine
  modified_base 103: mod_base = OTHER; note = uniform 2'-O-methyl ribonucleotides (a, c, g, inosine or u), deoxyribonucleotides (A, G, C or T), 2'-O-methylnebularine or deoxynebularine
  modified_base 1..4: mod_base = OTHER; note = phosphorothioate linkage
  modified_base 97..100: mod_base = OTHER; note = phosphorothioate linkage
  misc_feature 1..100: note = RNA
  misc_feature 101..103: note = Optionally DNA or RNA

SEQ ID NO: 3201 - DNA, 103 bp, synthetic construct; identical to SEQ ID NO: 1797
  source 1..103: mol_type = other DNA
  modified_base 1: mod_base = OTHER; note = 2'-O-methyl ribonucleotide
  modified_base 2: mod_base = OTHER; note = 2'-O-methyl ribonucleotide
  modified_base 3: mod_base = OTHER; note = 2'-O-methyl ribonucleotide
  modified_base 21: mod_base = OTHER; note = 2'-O-methyl ribonucleotide
  modified_base 28: mod_base = OTHER; note = 2'-O-methyl ribonucleotide
  modified_base 29: mod_base = OTHER; note = 2'-O-methyl ribonucleotide
  modified_base 30: mod_base = OTHER; note = 2'-O-methyl ribonucleotide
  modified_base 31: mod_base = OTHER; note = 2'-O-methyl ribonucleotide
  modified_base 32: mod_base = OTHER; note = 2'-O-methyl ribonucleotide
  modified_base 33: mod_base = OTHER; note = 2'-O-methyl ribonucleotide
  modified_base 34: mod_base = OTHER; note = 2'-O-methyl ribonucleotide
  modified_base 35: mod_base = OTHER; note = 2'-O-methyl ribonucleotide
  modified_base 36: mod_base = OTHER; note = 2'-O-methyl ribonucleotide
  modified_base 37: mod_base = OTHER; note = 2'-O-methyl ribonucleotide
  modified_base 38: mod_base = OTHER; note = 2'-O-methyl ribonucleotide
  modified_base 39: mod_base = OTHER; note = 2'-O-methyl ribonucleotide
  modified_base 40: mod_base = OTHER; note = 2'-O-methyl ribonucleotide
  modified_base 41: mod_base = OTHER; note = 2'-O-methyl ribonucleotide
  modified_base 42: mod_base = OTHER; note = 2'-O-methyl ribonucleotide
  modified_base 46: mod_base = OTHER; note = 2'-O-methyl ribonucleotide
  modified_base 48: mod_base = OTHER; note = 2'-O-methyl ribonucleotide
  modified_base 50: mod_base = OTHER; note = 2'-O-methyl ribonucleotide
  modified_base 52: mod_base = OTHER; note = 2'-O-methyl ribonucleotide
  modified_base 53: mod_base = OTHER; note = 2'-O-methyl ribonucleotide
  modified_base 54: mod_base = OTHER; note = 2'-O-methyl ribonucleotide
  modified_base 55: mod_base = OTHER; note = 2'-O-methyl ribonucleotide
  modified_base 56: mod_base = OTHER; note = 2'-O-methyl ribonucleotide
  modified_base 57: mod_base = OTHER; note = 2'-O-methyl ribonucleotide
  modified_base 60: mod_base = OTHER; note = 2'-O-methyl ribonucleotide
  modified_base 61: mod_base = OTHER; note = 2'-O-methyl ribonucleotide
  modified_base 66: mod_base = OTHER; note = 2'-O-methyl ribonucleotide
  modified_base 67: mod_base = OTHER; note = 2'-O-methyl ribonucleotide
  modified_base 70: mod_base = OTHER; note = 2'-O-methyl ribonucleotide
  modified_base 71: mod_base = OTHER; note = 2'-O-methyl ribonucleotide
  modified_base 72: mod_base = OTHER; note = 2'-O-methyl ribonucleotide
  modified_base 73: mod_base = OTHER; note = 2'-O-methyl ribonucleotide
  modified_base 74: mod_base = OTHER; note = 2'-O-methyl ribonucleotide
  modified_base 75: mod_base = OTHER; note = 2'-O-methyl ribonucleotide
  modified_base 76: mod_base = OTHER; note = 2'-O-methyl ribonucleotide
  modified_base 77: mod_base = OTHER; note = 2'-O-methyl ribonucleotide
  modified_base 78: mod_base = OTHER; note = 2'-O-methyl ribonucleotide
  modified_base 79: mod_base = OTHER; note = 2'-O-methyl ribonucleotide
  modified_base 80: mod_base = OTHER; note = 2'-O-methyl ribonucleotide
  modified_base 81: mod_base = OTHER; note = 2'-O-methyl ribonucleotide
  modified_base 83: mod_base = OTHER; note = 2'-O-methyl ribonucleotide
  modified_base 84: mod_base = OTHER; note = 2'-O-methyl ribonucleotide
  modified_base 85: mod_base = OTHER; note = 2'-O-methyl ribonucleotide
  modified_base 86: mod_base = OTHER; note = 2'-O-methyl ribonucleotide
  modified_base 87: mod_base = OTHER; note = 2'-O-methyl ribonucleotide
  modified_base 88: mod_base = OTHER; note = 2'-O-methyl ribonucleotide
  modified_base 89: mod_base = OTHER; note = 2'-O-methyl ribonucleotide
  modified_base 90: mod_base = OTHER; note = 2'-O-methyl ribonucleotide
  modified_base 91: mod_base = OTHER; note = 2'-O-methyl ribonucleotide
  modified_base 92: mod_base = OTHER; note = 2'-O-methyl ribonucleotide
  modified_base 93: mod_base = OTHER; note = 2'-O-methyl ribonucleotide
  modified_base 94: mod_base = OTHER; note = 2'-O-methyl ribonucleotide
  modified_base 95: mod_base = OTHER; note = 2'-O-methyl ribonucleotide
  modified_base 96: mod_base = OTHER; note = 2'-O-methyl ribonucleotide
  modified_base 97: mod_base = OTHER; note = 2'-O-methyl ribonucleotide
  modified_base 98: mod_base = OTHER; note = 2'-O-methyl ribonucleotide
  modified_base 99: mod_base = OTHER; note = 2'-O-methyl ribonucleotide
  modified_base 100: mod_base = OTHER; note = 2'-O-methyl ribonucleotide
  modified_base 101: mod_base = OTHER; note = uniform 2'-O-methyl ribonucleotides (a, c, g, inosine or u), deoxyribonucleotides (A, G, C or T), 2'-O-methylnebularine or deoxynebularine
  modified_base 102: mod_base = OTHER; note = uniform 2'-O-methyl ribonucleotides (a, c, g, inosine or u), deoxyribonucleotides (A, G, C or T), 2'-O-methylnebularine or deoxynebularine
  modified_base 103: mod_base = OTHER; note = uniform 2'-O-methyl ribonucleotides (a, c, g, inosine or u), deoxyribonucleotides (A, G, C or T), 2'-O-methylnebularine or deoxynebularine
  modified_base 1..4: mod_base = OTHER; note = phosphorothioate linkage
  modified_base 97..100: mod_base = OTHER; note = phosphorothioate linkage
  misc_feature 1..100: note = RNA
  misc_feature 101..103: note = Optionally DNA or RNA
